(19) United States
(12) Patent Application Publication
(10) Pub. No.: US 2024/0197859 A1
(43) Pub. Date: Jun. 20, 2024

(54) Stabilized Pre-Fusion PIV3 F Proteins

(71) Applicant: JANSSEN VACCINES & PREVENTION B.V., Leiden (NL)

(72) Inventors: Johannes Petrus Maria Langedijk, Amsterdam (NL); Mark Johannes Gerardus Bakkers, Haarsteeg (NL); Tina Ritschel, Oegstgeest (NL); Jaroslaw Juraszek, Duivendrecht (NL)

(21) Appl. No.: 18/553,308

(22) PCT Filed: Mar. 31, 2022
(86) PCT No.: PCT/EP2022/058653

§ 371 Date: Sep. 29, 2023

(30) Foreign Application Priority Data
Apr. 1, 2021 (EP) 21166701.9

(51) Int. Cl. A61K 39/155; A61K 39/00; C07K 14/005; C12N 7/00; C12N 15/86

(52) U.S. Cl. CPC A61K 39/155; C07K 14/005; C12N 7/00; C12N 15/86; A61K 2039/53; C07K 2319/35; C12N 2710/10343; C12N 2760/18622; C12N 2760/18634

(57) ABSTRACT

The present invention relates to stabilized pre-fusion human parainfluenza virus 3 (HPIV3) F protein, and fragments thereof. The invention also relates to nucleic acid molecules encoding such proteins and fragments, and to the use of the proteins, fragments and nucleic acid molecules.

[0001] The present invention relates to the field of medicine. The invention, in particular, relates to recombinant pre-fusion PIV3 F proteins, to nucleic acid molecules encoding the PIV3 F proteins, and uses thereof, e.g. in vaccines.

### BACKGROUND OF THE INVENTION

[0002] Human parainfluenza type III (HPIV3) induces respiratory complications mainly in children and the immunocompromised; however, more recently, it was identified as a concern in the adult population as well. More than 11,000 hospitalizations of children per year in the US occur due to HPIV3 (Weinberg et., al., J Pediatr. 154: 694-699, 2009) and HPIV3 is also an important cause of mortality, morbidity, and health care costs in other vulnerable populations (Ison et. al., Clin. Microbiol Rev 32, 2019). Most children of 5 years of age and older have antibodies against HPIV-3, indicating most children have experienced an HPIV3 infection by that age.

[0003] There is currently no vaccine and no specific antiviral treatment to prevent HPIV illness. Medical care is supportive, except for croup where the use of corticosteroids and nebulized epinephrine has been found to be beneficial.

[0004] Four serotypes of HPIV are known (HPIV-1 through -4), which are associated with distinct clinical presentations and seasonal incidence, with HPIV3 being the most prevalent and commonly presenting as bronchiolitis/pneumonia. Seasonal variations in the different serotypes and spontaneous outbreaks drive an overall variable incidence and complex epidemiology.

[0005] HPIV3 is an enveloped RNA virus in the Paramyxoviridae family of the order Mononegavirales. It has a genome of ˜15,000 nucleotides in length that encodes six key proteins in the following gene sequence: 3′-N-P-M-F-HN-L-5. Virus-cell fusion results from coordinated action of the two envelope glycoproteins that comprise the viral entry machinery—a receptor binding protein, hemagglutinin neuraminidase (HN), and a fusion protein (F). Upon binding to sialic acid-containing target receptors, HN, a molecule with both receptor binding and cleaving activities, triggers and activates the F protein. The F protein fuses the viral and host-cell membranes by irreversible protein refolding from the labile pre-fusion conformation to the stable post-fusion conformation. Structures of both conformations have been determined for several paramyxoviruses, providing insight into the complex mechanism of this fusion protein. As type I membrane protein, the F protein is translated at the endoplasmic reticulum and transported through the Golgi apparatus and trans-Golgi network to the plasma membrane. Like other class I fusion proteins, the inactive precursor, PIV3 F₀, requires cleavage into the disulfide-linked subunits F1 and F2 by appropriate host endoproteases, likely TMPRSS2, at a monobasic cleavage site. After this cleavage, F1 contains a hydrophobic fusion peptide (FP) at its N-terminus. In order to refold from the pre-fusion to the post-fusion conformation, the refolding region 1 (RR1) between residue 110 and 213, that includes the FP and heptad repeat A (HRA), (wherein the numbering is based on the numbering of amino acid residues in SEQ ID NO: 1) has to transform from an assembly of helices, loops and strands to a long continuous helix. The FP, located at the N-terminal segment of RR1, is then able to extend away from the viral membrane and to insert into the proximal membrane of the target cell. Next, the refolding region 2 (RR2), which forms the C-terminal stem in the pre-fusion F spike and includes the heptad repeat B (HRB), relocates to the other side of the PIV3 F head and binds the HRA coiled-coil trimer with the HRB domain to form the six-helix bundle. The formation of the RR1 coiled-coil and relocation of RR2 to complete the six-helix bundle are the most dramatic structural changes that occur during the refolding process. Class I fusion proteins have been shown to be inherently unstable and structure-based stabilization of viral fusion protein in the prefusion conformation have been shown to induce superior neutralization and protection in animal models and clinical trials (Krarup et al., Nat Commun. 6:8143, 2015; De Taeye, Cell 163(7): 1702-1715, 2015; Mclellan et al., Science. 342(6158): 592-598, 2013; Stewart-Jones et al., PNAS 48: 12265-12270, 2018; Crank et al., Science 365(6452): 505-509, 2019, Sadoff et al., JID doi: 10.1093/infdis/jiab003 2021; Sadoff et al., NEJM, doi: 10.1056/NEJMoa2034201 2021), but until this date, still no vaccine is available and also no therapy exists for prevention or treatment of hPIV3.

[0006] Therefore, a need remains for efficient vaccines against PIV3, in particular vaccines comprising or based on PIV3 F proteins in the pre-fusion conformation. Indeed, vaccines, preferably indicated for pediatric and high-risk patients (e.g., elderly and COPD patients) could provide broad impact intervention far upstream of a serious illness thereby reducing HPIV3 overall incidence and associated morbidity and mortality. The present invention aims at providing means for obtaining such stable pre-fusion PIV3 F proteins for use in vaccinating against PIV3.

### SUMMARY OF THE INVENTION

[0007] The present invention provides stable, recombinant, pre-fusion human parainfluenza type III (HPIV3) fusion (F) proteins, i.e. recombinant HPIV3 F proteins that are stabilized in the pre-fusion conformation, and fragments thereof. The pre-fusion HPIV3 F proteins, or fragments thereof, comprise at least one epitope that is specific to the pre-fusion conformation F protein, e.g. as determined by specific binding of an antibody that is specific for the pre-fusion conformation to the proteins. In certain preferred embodiments, the pre-fusion HPIV3 F proteins are soluble multimeric, preferably trimeric, proteins. The invention also provides nucleic acid molecules encoding the pre-fusion HPIV3 F proteins, or fragments thereof, as well as vectors, e.g. adenovectors, comprising such nucleic acid molecules.

[0008] The invention also relates to methods of stabilizing HPIV3 F proteins in the pre-fusion conformation, and to the pre-fusion PIV3 F proteins obtainable by said methods.

[0009] The invention further relates to compositions, preferably pharmaceutical compositions, comprising an PIV3 F protein, a nucleic acid molecule and/or a vector, as described herein, and to the use thereof in inducing an immune response against PIV3 F protein, in particular to the use thereof as a vaccine against PIV3. The invention also relates to methods for inducing an anti-parainfluenza virus type III (PIV3) immune response in a subject, comprising administering to the subject an effective amount of a pre-fusion HPIV3 F protein, a nucleic acid molecule encoding said HPIV3 F protein, and/or a vector comprising said nucleic acid molecule, as described herein. Preferably, the induced immune response is characterized by the induction of neutralizing antibodies to PIV3 and/or protective immunity against PIV3. In particular aspects, the invention relates to a method for inducing anti-parainfluenza virus type III (PIV3) F antibodies in a subject, comprising administering to the subject an effective amount of a pharmaceutical composition comprising a pre-fusion HPIV3 F protein, a nucleic acid molecule encoding said PIV3 F protein, and/or a vector comprising said nucleic acid molecule, as described herein.

### BRIEF DESCRIPTION OF THE FIGURES

[0010] FIG. 1: Schematic representation of the conserved elements of the PIV3 F protein in both the full-length, membrane bound protein (‘full-length’, top panel) and in the mature, soluble ectodomain (‘ectodomain’, bottom panel). The N-terminal F2 domain is preceded by a signal peptide sequence (SP) that is cleaved off during protein maturation. The fusion peptide (FP) is located at the N-terminus of F1. Heptad repeats A, B and C are indicated (HRA, HRB, HRC, respectively). Further indicated are the transmembrane region (TM) and cytoplasmic tail (CT). Soluble ectodomains may be equipped with a C-terminal GCN4 trimerization motif. Cleavage site between SP and F2 and between F2 and F1 are indicated with arrows.

[0011] FIG. 2: PIA174 binding to PIV3 preF in cell supernatant determined by biolayer interferometry. Quantitative octet measurements were performed by immobilizing antibody PIA174 to anti-human-IgG sensors and with PIV3 F in crude cell supernatant. Plotted is the initial binding rate. Cell culture medium of mock transfected cells (‘Mock’) and PIV3 F without stabilizing mutations and without GCN4 (‘Wildtype’, SEQ ID NO: 2) were taken along as negative controls. Measurements were performed at day of harvest (‘day 0’) and were repeated after 20-day storage at 4° C. (‘Day 20’). Single and double mutations were tested in a backbone with GCN4 trimerization domain and D452N mutation, as indicated.

[0012] FIG. 3: Analytical SEC profiles of different PIV3 F proteins with stabilizing mutations in crude cell supernatant. Indicated protein variants (black, solid lines), were compared to mock transfected supernatant (dashed lines). The peak between 4.4 and 4.5 minutes corresponds to the PIV3 preF trimer.

[0013] FIG. 4: PIA 174 binding to PIV3 preF in cell supernatant determined by biolayer interferometry of single and all possible double combinations of stabilizing mutations. Quantitative octet measurements were performed by immobilizing antibody PIA174 to anti-human-IgG sensors and with PIV3 F in crude cell supernatant. Plotted is the initial binding rate. Cell culture medium of mock transfected cells (‘Mock’) and PIV3 F without stabilizing mutations and without GCN4 (‘Wildtype’, SEQ ID NO: 2) were taken along as controls. Measurements were performed at day of harvest. Single and double mutations were tested in a backbone with GCN4 trimerization domain and D452N mutation, as indicated.

[0014] FIG. 5: PIA 174 binding to PIV3 preF in 5-fold diluted cell supernatant determined by biolayer interferometry of all possible combinations of selected stabilizing mutations. Quantitative octet measurements were performed by immobilizing antibody PIA174 to anti-human-IgG sensors and with PIV3 F in 5-fold diluted crude cell supernatant. Plotted is the initial binding rate. Combinations of mutations were tested in a backbone with GCN4 trimerization domain and D452N, Q89M, Q2221 and L168P mutations, as indicated.

[0015] FIG. 6: Stabilized PIV3 preF in absence of GCN4 trimerization domain. (A) PIA174 binding to PIV3 preF PIV200941 (without GCN4 trimerization domain, but with D452N+Q89M+Q222I+L168P mutations) in cell supernatant as determined by biolayer interferometry. S470V and/or S477V were introduced in the stem of the PIV3 F protein. Plotted is the initial binding rate. (B) Samples of A tested in analytical SEC. The peak at ˜4.8 minutes corresponds to the PIV3 preF trimer. (C) PIA174 binding to unstabilized PIV3 preF without GCN4 trimerization domain (PIV190058, SEQ ID NO: 2), in cell supernatant as determined by biolayer interferometry. S470V or S477V ((PIV200960 and PIV200962, respectively) were introduced in the stem of the PIV3 F protein. Plotted is the initial binding rate.

[0016] FIG. 7: Further stabilization of PIV3 preF in absence of GCN4 trimerization domain. (A) PIA 174 binding to a matrix of PIV3 preF designs without GCN4 trimerization domain in cell supernatant as determined by biolayer interferometry. Plotted is the initial binding rate. (B) Samples of (A) tested in analytical SEC. The peak at ˜4.8 minutes corresponds to the PIV3 preF trimer.

[0017] FIG. 8: Removal of S470V and S477V opens up the PIV3 preF trimer. (A) Crude cell supernatants of PIV201105 and PIV201103 of FIG. 7B were tested in analytical SEC-MALS. Hydrodynamic radius and molecular weight (MW) of the main peaks (indicated with an arrow) were determined and are reported in (B). The MALS signal corresponding to the molecular weight is shown as a dotted line for the respective peaks.

[0018] FIG. 9: Analytical SEC after heat stress. Indicated proteins in crude cell supernatant were incubated for 30 minutes at 4° ° C. (dashed line), 50° ° C. (black line) or 60° C. (gray line). Samples were then analyzed by analytical SEC to determine loss of PIV3 preF trimer. The backbone used contained S41P+Q89M+Q2221+N167P+L168P+D452N+S470V+S477V stabilizing mutations and did not have a heterologous trimerization domain.

[0019] FIG. 10: Stability of PIV3 preF variants. Crude cell supernatants of indicated proteins were analyzed by differential scanning fluorimetry (DSF) to determine the melting temperature.

[0020] FIG. 11: Characterization of purified PIV3 preF proteins. Proteins were purified from expiHEK supernatant using C-tag purification followed by size-exclusion chromatography. (A) Overview of the different protein designs, and their yield after purification. (B) SDS-PAGE under reducing and non-reducing conditions. Unprocessed PIV3 F proteins runs at ˜50 kD. (C) SEC-MALS and (D) DSF analysis of purified proteins.

[0021] FIG. 12: A: Table of constructs used, indicating the absence (−) or presence of HR2 stem mutations S470V+S477V in the designs, and the absence (−) or introduction of various amino acid substitutions in the head domain of the PIV3 F protein. Single head mutations were assessed, except for the combination of Q889M+Q221I, the sidechains of which interact in the prefusion structure. B. Prefusion PIV3 F trimer detection in the supernatant of cells transfected with variants indicated in A) as determined by binding of prefusion-specific PIA174 antibody with biolayer interferometry (qOctet). Quantitative octet measurements were performed by immobilizing antibody PIA174 to anti-human-IgG sensors and with PIV3 F in crude cell supernatant. Plotted is the initial binding rate. C. PIV3 F trimer detection in the supernatant of cells transfected with variants indicated in A) as determined by analytical SEC. PIV3 F trimer (indicated with ‘T’) elutes between 4.6- and 4.8-minutes. Each panel compares the absence (dotted line) or presence (solid line) of S470V+S477V mutations in conjunction with amino acid substitution(s) in the head domain of PIV3 F (specific mutation indicated above each graph).

[0022] FIG. 13: A. Description of constructs used and corresponding melting temperature of PIV3 F trimer in supernatant of transfected Expi293 cells, as determined by differential scanning fluorimetry (DSF). The removal of single or double mutations from PIV211368 by reverting them to wildtype amino acids is indicated in bold. B. PIV3 F trimer yield in supernatant of cells transfected with variants indicated in A) as determined by analytical SEC. PIV3 F trimer elutes between 4.6- and 4.8-minutes retention time.

[0023] FIG. 14: A. Analytical SEC of purified PIV3 F trimer PIV211368. Tagless PIV3 F was purified from cell-free supernatant of transfected Expi293 cells by ion exchange purification and polishing via size exclusion chromatography. B. Table of purified PIV211368 PIV3 F protein characteristics, including yield, trimer size, hydrodynamic radius and melting temperature (DSF).

C. Slow-freeze stability of purified PIV3 F trimer PIV211368 in different buffers. The recovery of PIV3 F trimer after slowly freezing protein from 20° C. to −70° C. during a 24-hour period is compared to trimer recovery after 4° C. storage (histogram is average of n=5 individual measurements (open circles). Buffer composition: FB12; 20 mM Histidine, 75 mM NaCl, 5% sucrose, 0.02% PS80, 0.4% (w/w) EtOH, 0.1 mM EDTA, pH 6.5. PS4P4; 20 mM KHPO4, 75 mM NaCl, 4% Sucrose, PS20 0.01%, pH 6.5. TS5P2; 20 mM Tris, 75 mM NaCl, 5% sucrose, 0.02% PS20, 0.4% EtOH, pH7.5.
FIG. 15: A. Analytical SEC of purified PIV3 F trimer PIV210235. PIV3 F was purified from cell-free supernatant of transfected GnT1-cells by C-tag purification and polishing via size exclusion chromatography. B. Table of purified PIV210235 PIV3 F protein characteristics, including yield, trimer size, hydrodynamic radius and melting temperature (DSF).

### DETAILED DESCRIPTION OF THE INVENTION

[0024] As described above, the fusion protein (F) of the parainfluenza virus (PIV3) is involved in fusion of the viral membrane with a host cell membrane, which is required for infection. PIV3 F mRNA is translated into a 539 amino acid precursor protein designated F0, which contains a signal peptide sequence at the N-terminus (e.g. amino acid residues 1-18 of SEQ ID NO: 1) which is removed by a signal peptidase in the endoplasmic reticulum. F0 is cleaved, probably at the cell membrane, between amino acid residues 109 and 110 by cellular proteases (most likely TMPRSS2, or TMPRSS2-like enzymes) generating two domains or subunits designated F1 and F2. The F1 domain (amino acid residues 110-539) contains a hydrophobic fusion peptide at its N-terminus and the C-terminus contains the transmembrane (TM) (amino acid residues 494-516) and cytoplasmic region (amino acid residues 517-539). The F2 domain (amino acid residues 19-109) is covalently linked to F1 by one disulfide bridges (FIG. 1). The F1-F2 heterodimers are assembled as homotrimers on the virion surface. The mature ectodomain of the PIV3 F protein (comprising the amino acid residues 19-493) can be structurally divided in a globular head domain (amino acid residues 19-451), and a fibrous stem region (amino acid residues 452-484).

[0025] A vaccine against PIV3 infection is currently not yet available. One potential approach to producing a vaccine is a subunit vaccine based on purified PIV3 F protein. However, for this approach it is desirable that the purified PIV3 F protein is in a conformation which resembles the conformation of the pre-fusion state of PIV3 F protein, which is stable over time, i.e. remains in the pre-fusion conformation, e.g. as determined by specific binding of the PIV3 F protein to antibodies that are specific for the pre-fusion conformation to the PIV3 F protein, and can be produced in sufficient quantities. In addition, for a soluble, subunit-based vaccine, the PIV3 F protein needs to be truncated by deletion of the transmembrane (TM) and the cytoplasmic region to create a soluble secreted F protein ectodomain (sF). Because the TM region is responsible for membrane anchoring and increases stability, the ectodomain of the F protein is considerably more labile than the full-length protein and will even more readily refold into the post-fusion end-state. In order to obtain soluble F protein in the pre-fusion conformation that shows high expression levels and high stability, the pre-fusion conformation thus needs to be stabilized.

[0026] Because also the full length (membrane-bound) PIV3 F protein is metastable, the stabilization of the pre-fusion conformation is also desirable for the full length PIV3 F protein, i.e. including the TM and cytoplasmic region, e.g. for any live attenuated or vector based vaccine approaches.

[0027] Recently, a HPIV-3 protein variant was described, containing several stabilizing amino acid substitutions that stabilized the prefusion conformation (Stewart-Jones et al., PNAS 115 (48) 12265-12270, 2018). However, this variant has some limitations; i.e. i) Expression and stability of this PIV3 preF protein was insufficient for full development of a successful vaccine; ii) Several of these mutations were located at the surface of the protein, which may impact antigenicity and immunogenicity; and/or iii) This variant is C-terminally fused to the GCN4 trimerization domain which may impact immunogenicity and induce non-relevant antibodies to this trimerization domain that will not cross react with the virus and may hamper immunogenicity when this domain is used in other (future) vaccines which will increase its immunodominance.

[0028] The present invention provides stabilized pre-fusion human parainfluenza virus 3 (HPIV3) F proteins, comprising an F1 and an F2 domain comprising an amino acid sequence of the F1 and F2 domain of an F protein of an HPIV3 strain, comprising a hydrophobic amino acid at position 470 and at position 477, wherein the numbering of the amino acid positions is according to the numbering is amino acid residues in SEQ ID NO: 1. Preferably, the proteins are trimeric.

[0029] The hydrophobic amino acid at positions 470 and/or 477 can be any hydrophobic amino acid, including, but not limited to valine, leucine, isoleucine, methionine, and phenylalanine. The amino acid residues at position 470 and 477 may be the same hydrophobic amino acid, or different hydrophobic amino acids. In certain preferred embodiments, the hydrophobic amino acid at position 470 and/or 477 is valine (V), preferably both the amino acid at position 470 and 477 are valine (V).

[0030] In certain embodiments, the proteins comprise one or more additional mutations. Thus, in certain embodiments, the amino acid residue at position 452 is N, and/or the amino acid residue at position 41 is P, and/or the amino acid residue at position 167 is P, and/or the amino acid residue at position 168 is P, and/or the amino acid sequence at position 335 is P, and/or the amino acid residue at position 89 is M and the amino acid residue at position 222 is I, and/or the amino acid residue at position 165 is P, and/or the amino acid residue at position 198 is L, and/or comprising a disulfide bridge between the amino acid residues 85 and 221, and/or between 186 and 195, wherein the numbering of the amino acid positions is according to the numbering is amino acid residues in SEQ ID NO: 1.

[0031] The present invention provides stabilized trimeric pre-fusion HPIV-3 proteins that show high expression levels and increased stability.

[0032] According to the invention it has been demonstrated that the presence of one or more of the specific amino acid residues at the indicated positions increases the stability of the HPIV3 F proteins and/or HPIV3 F protein ectodomains in the pre-fusion conformation, as compared to HPIV3 F protein without these amino acid residues at these positions. According to the invention, the specific amino acids can be either already present in the amino acid sequence or can be introduced by substitution (mutation) of the amino acid on that position into the specific amino acid according to the invention.

[0033] In addition, the invention provides stabilized pre-fusion human parainfluenza virus 3 (HPIV3) F proteins, comprising an F1 and an F2 domain, comprising an amino acid sequence of the F1 and F2 domain of an F protein of an HPIV3 strain, wherein the amino acid residue at position 452 is N, and/or the amino acid residue at position 41 is P, and/or the amino acid residue at position 167 is P, and/or the amino acid residue at position 168 is P, and/or the amino acid sequence at position 335 is P, and/or the amino acid residue at position 470 is V and/or the amino acid residue at position 477 is V and/or the amino acid residue at position 89 is M and the amino acid residue at position 222 is I, and/or the amino acid residue at position 165 is P, and/or the amino acid residue at position 198 is L, and/or comprising a disulfide bridge between the amino acid residues 85 and 221, and/or between 186 and 195, wherein the numbering of the amino acid positions is according to the numbering of amino acid residues in SEQ ID NO: 1.

[0034] It is noted that the terms HPIV-3 and PIV-3 are used interchangeably throughout this application.

[0035] In certain embodiments, the amino acid residue at position 204 is D and/or the amino acid residue at position 367 is L and/or the amino acid residue at position 436 is P, and/or the protein comprises a disulfide bridge between the amino acid residues 38 and 291.

[0036] In certain embodiments. the proteins have an increased stability (thermostability) upon storage a 4° C., and/or at 50° C. and/or or 60° C., as compared to HPIV3 F proteins without the presence of these amino acid residues at these positions. With “stability upon storage”, it is meant that the proteins still display the at least one epitope specific for a pre-fusion specific antibody upon storage of the protein in solution (e.g. culture medium) at 4°, 50° C. and/or or 60ºC for a predetermined period of time.

[0037] In addition, or alternatively, the proteins may have an increased thermostability, e.g. as indicated by an increased melting temperature (measured by e.g. differential scanning fluorimetry).

[0038] The invention also provides fragments of the HPIV-3 F proteins. The term “fragment” as used herein refers to a HPIV3 polypeptide that has an amino-terminal (e.g. by cleaving off the signal sequence) and/or carboxy-terminal (e.g. by deleting the transmembrane region and/or cytoplasmic tail) and/or internal deletion, but wherein the remaining amino acid sequence is identical to the corresponding positions in the sequence of the HPIV3 F protein, for example, the full-length sequence of a HPIV3 F protein. It will be appreciated that for inducing an immune response and in general for vaccination purposes, a protein needs not to be full length nor have all its wild type functions, and fragments of the protein are equally useful. A fragment according to the invention is an immunologically active fragment, and typically comprises at least 15 amino acids, or at least 30 amino acids, of the HPIV3 F protein. In certain embodiments, a fragment comprises at least 50, 75, 100, 150, 200, 250, 300, 350, 400, 450, 460, 470, 480, 490, 500, or 510 amino acids of the HPIV3 F protein. In a preferred embodiment, the fragment is an HPIV3 F protein ectodomain, consisting of the amino acid residues 19-484 of the HPIV3 F protein.

[0039] In certain embodiments, the proteins or fragments thereof according to the invention do not comprise a signal sequence. It will be understood by the skilled person that signal sequences (sometimes referred to as signal peptide, targeting signal, localization signal, localization sequence, transit peptide, leader sequence or leader peptide) function to prompt a cell to translocate the protein, usually to the cellular membrane. Signal peptidase may cleave either during or after completion of translocation to generate a free signal peptide and a mature protein. In certain embodiments, the PIV3 F protein ectodomain comprises a truncated F1 domain, preferably the truncated F1 domain does not comprise the transmembrane and cytoplasmic regions of the HPIV3 F protein. According to the invention said truncated F1 domain may comprise the amino acids 110-484, preferably the amino acids 110-485. In certain embodiments, the truncates F1 domain consists of the amino acids 110-484, preferably the amino acids 110-485 of the HPIV3 F protein.

[0040] In order to promote stable trimerization of the HPIV3 F ectodomains, a heterologous trimerization domain may be linked to the truncated F1 domain.

[0041] As described above, because the TM region is responsible for membrane anchoring and increases stability, the ectodomain of the F protein is considerably more labile than the full-length protein and will even more readily refold into the post-fusion end-state. In order to obtain stable soluble F protein in the pre-fusion conformation that shows high expression levels and high stability in certain embodiments a heterologous trimerization domain may be linked to the truncated F1 domain. The heterologous trimerization domain can be a GCN4 Leucine-Zipper domain. According to the invention, the heterologous trimerization domain preferably comprises, or consists of, the amino acid sequence of SEQ ID NO: 3. Alternative versions of GCN4 domains, or other heterologous trimerizations domains are also suitable according to the invention.

[0042] As used throughout the present application, the amino acid positions are given in reference to a wild type sequence of the HPIV3 F protein of SEQ ID NO: 1. As used in the present invention, the wording “the amino acid residue at position “x” of the F protein thus means the amino acid residue corresponding to the amino acid residue at position “x” in the HPIV3 F protein of SEQ ID NO: 1. Note that, in the numbering system used throughout this application 1 refers to the N-terminal amino acid of an immature F0 protein (SEQ ID NO: 1). When an F protein of another HPIV-3 strain is used, the amino acid positions of the F protein are to be numbered with reference to the numbering of the F protein of SEQ ID NO: 1 by aligning the sequences of the other HPIV3 F protein with the F protein of SEQ ID NO: 1 with the insertion of gaps as needed. Sequence alignments can be done using methods well known in the art, e.g. by CLUSTALW, Bioedit or CLC Workbench.

[0043] The present invention in particular provides stabilized pre-fusion human parainfluenza virus 3 (HPIV3) F protein ectodomains, comprising a truncated F1 domain and an F2 domain, comprising an amino acid sequence of the F1 and F2 domain of an F protein of an HPIV3 strain, wherein the amino acid residue at position 470 and/or 477 is a hydrophobic amino acid, wherein the protein does not comprise a heterologous trimerization domain, and wherein the numbering of the amino acid positions is according to the numbering is amino acid residues in SEQ ID NO: 1.

[0044] According to the present invention, it has been demonstrated that stable soluble trimeric pre-fusion PIV-3 ectodomains (i.e. soluble trimeric pre-fusion PIV-3 proteins) can be obtained without the presence of a heterologous trimerization domain, when the amino acid residue at position 470 and/or the amino acid residue at position 477 is a hydrophobic amino acid, preferably when the amino acid residues at both position 470 and 477 are hydrophobic.

[0045] The hydrophobic amino acid at positions 470 and/or 477 can be any hydrophobic amino acid, including, but not limited to, valine, leucine, isoleucine, methionine, and phenylalanine. The amino acid residues at position 470 and 477 may be the same hydrophobic amino acid, or different hydrophobic amino acids. In certain preferred embodiments, the hydrophobic amino acid at position 470 and/or 477 is valine (V), preferably both the amino acid at position 470 and 477 are valine (V).

[0046] In certain embodiments, the truncated F1 domain does not comprise the transmembrane and cytoplasmic regions. Preferably, the truncated F1 domain comprises the amino acids 110-484, preferably 110-485. In certain embodiment, the truncated F1 domain consists of the amino acids 110-484, preferably the amino acids 110-485 of the HPIV3 F protein.

[0047] In certain embodiments, furthermore the amino acid residue at position 452 is N, and/or the amino acid residue at position 41 is P, and/or the amino acid residue at position 167 is P, and/or the amino acid residue at position 168 is P, and/or the amino acid sequence at position 335 is P, and/or the amino acid residue at position 89 is M and the amino acid residue at position 222 is I.

[0048] In addition, or alternatively, the amino acid residue at position 165 is P, and/or the amino acid residue at position 198 is L, and/or the amino acid residue at position 204 is D, and/or the amino acid at position 367 is L, and/or the amino acid residue at position 436 is P, and/or the HPIV3 F protein ectodomain further comprises a disulfide bridge between the amino acid residues 85 and 221, and/or between 186 and 195, and/or between 38 and 291.

[0049] In certain preferred embodiments the protein comprises an amino acid sequence of a HPIV 3 F protein wherein the amino acid residue at position 41 is P, and the amino acid residue at position 89 is M and the amino acid residue at position 222 is I, and the amino acid residue at position 168 is P, and the amino acid residue at position 470 is V and the amino acid residue at position 477 is V, wherein the numbering of the amino acid positions is according to the numbering of amino acid residues in SEQ ID NO: 1.

[0050] In certain embodiments, furthermore the amino acid residue at position 167 is P, the amino acid at residue at position 452 is N and/or the amino acid residue at position 335 is P.

[0051] In another preferred embodiment, the protein comprises an amino acid sequence of a HPIV 3 F protein wherein the amino acid residue at position 41 is P, and the amino acid residue at position 89 is M and the amino acid residue at position 222 is I, and the amino acid residue at position 168 is P, and the amino acid at position 335 is P, and the amino acid residue at position 470 is V and the amino acid residue at position 477 is V, wherein the numbering of the amino acid positions is according to the numbering of amino acid residues in SEQ ID NO: 1.

[0052] In certain embodiments, the protein comprises an amino acid selected from the group consisting of SEQ ID NO: 4-242. Preferably, the protein comprises an amino acid sequence selected from the group consisting of SEQ ID NO: 199, SEQ ID NO: 201, SEQ ID NO: 208, SEQ ID NO: 209 and SEQ ID NO: 210, or fragments thereof.

[0053] In certain embodiments, the proteins do not comprise a signal sequence.

[0054] As used throughout the present application nucleotide sequences are provided from 5′ to 3′ direction, and amino acid sequences from N-terminus to C-terminus, as custom in the art.

An amino acid according to the invention can be any of the twenty naturally occurring (or ‘standard’ amino acids). The standard amino acids can be divided into several groups based on their properties. Important factors are charge, hydrophilicity or hydrophobicity, size and functional groups. These properties are important for protein structure and protein-protein interactions. Some amino acids have special properties such as cysteine, that can form covalent disulfide bonds (or disulfide bridges) to other cysteine residues, proline that induces turns of the protein backbone, and glycine that is more flexible than other amino acids. Table 1 shows the abbreviations and properties of the standard amino acids.

[0055] It will be appreciated by a skilled person that the mutations can be made to the protein by routine molecular biology procedures. The mutations according to the invention preferably result in increased expression levels and/or increased stabilization of the pre-fusion PIV3 F proteins as compared to PIV3 F proteins that do not comprise these mutation(s).

[0056] The present invention further provides nucleic acid molecules encoding the PIV3 F proteins according to the invention.

[0057] In preferred embodiments, the nucleic acid molecules encoding the proteins according to the invention are codon-optimized for expression in mammalian cells, preferably human cells. Methods of codon-optimization are known and have been described previously (e.g. WO 96/09378). A sequence is considered codon-optimized if at least one non-preferred codon as compared to a wild type sequence is replaced by a codon that is more preferred. Herein, a non-preferred codon is a codon that is used less frequently in an organism than another codon coding for the same amino acid, and a codon that is more preferred is a codon that is used more frequently in an organism than a non-preferred codon. The frequency of codon usage for a specific organism can be found in codon frequency tables, such as in http://www.kazusa.or.jp/codon. Preferably more than one non-preferred codon, preferably most or all non-preferred codons, are replaced by codons that are more preferred. Preferably the most frequently used codons in an organism are used in a codon-optimized sequence. Replacement by preferred codons generally leads to higher expression.

[0058] It will be understood by a skilled person that numerous different polynucleotides and nucleic acid molecules can encode the same protein as a result of the degeneracy of the genetic code. It is also understood that skilled persons may, using routine techniques, make nucleotide substitutions that do not affect the protein sequence encoded by the nucleic acid molecules to reflect the codon usage of any particular host organism in which the proteins are to be expressed. Therefore, unless otherwise specified, a “nucleotide sequence encoding an amino acid sequence” includes all nucleotide sequences that are degenerate versions of each other and that encode the same amino acid sequence. Nucleotide sequences that encode proteins and RNA may or may not include introns.

[0059] Nucleic acid sequences can be cloned using routine molecular biology techniques, or generated de novo by DNA synthesis, which can be performed using routine procedures by service companies having business in the field of DNA synthesis and/or molecular cloning (e.g. GeneArt, GenScripts, Invitrogen, Eurofins).

[0060] The invention also provides vectors comprising a nucleic acid molecule as described above. In certain embodiments, a nucleic acid molecule according to the invention thus is part of a vector.

[0061] In certain embodiments of the invention, the vector is an adenovirus vector. An adenovirus according to the invention belongs to the family of the Adenoviridae, and preferably is one that belongs to the genus Mastadenovirus. It can be a human adenovirus, but also an adenovirus that infects other species, including but not limited to a bovine adenovirus (e.g., bovine adenovirus 3, BAdV3), a canine adenovirus (e.g., CAdV2), a porcine adenovirus (e.g., PAdV3 or 5), or a simian adenovirus (which includes a monkey adenovirus and an ape adenovirus, such as a chimpanzee adenovirus or a gorilla adenovirus). Preferably, the adenovirus is a human adenovirus (HAdV, or AdHu), or a simian adenovirus such as chimpanzee or gorilla adenovirus (ChAd, AdCh, or SAdV), or a rhesus monkey adenovirus (RhAd). In the invention, a human adenovirus is meant if referred to as Ad without indication of species, e.g., the brief notation “Ad26” means the same as HAdV26, which is human adenovirus serotype 26. Also as used herein, the notation “rAd” means recombinant adenovirus, e.g., “rAd26” refers to recombinant human adenovirus 26.

[0062] Most advanced studies have been performed using human adenoviruses, and human adenoviruses are preferred according to certain aspects of the invention. In certain preferred embodiments, a recombinant adenovirus according to the invention is based upon a human adenovirus. In preferred embodiments, the recombinant adenovirus is based upon a human adenovirus serotype 5, 11, 26, 34, 35, 48, 49, 50, 52, etc. According to a particularly preferred embodiment of the invention, an adenovirus is a human adenovirus of serotype 26. Advantages of these serotypes include a low seroprevalence and/or low pre-existing neutralizing antibody titers in the human population, and experience with use in human subjects in clinical trials.

[0063] Simian adenoviruses generally also have a low seroprevalence and/or low pre-existing neutralizing antibody titers in the human population, and a significant amount of work has been reported using chimpanzee adenovirus vectors (e.g., U.S. Pat. No. 6,083,716; WO 2005/071093; WO 2010/086189; WO 2010/085984; Farina et al, 2001, J Virol 75: 11603-13; Cohen et al, 2002, J Gen Virol 83: 151-55; Kobinger et al, 2006, Virology 346: 394-401; Tatsis et al., 2007, Molecular Therapy 15: 608-17; see also review by Bangari and Mittal, 2006, Vaccine 24: 849-62; and review by Lasaro and Ertl, 2009, Mol Ther 17: 1333-39). Hence, in other embodiments, the recombinant adenovirus according to the invention is based upon a simian adenovirus, e.g. a chimpanzee adenovirus. In certain embodiments, the recombinant adenovirus is based upon simian adenovirus type 1, 7, 8, 21, 22, 23, 24, 25, 26, 27.1, 28.1, 29, 30, 31.1, 32, 33, 34, 35.1, 36, 37.2, 39, 40.1, 41.1, 42.1, 43, 44, 45, 46, 48, 49, 50 or SA7P. In certain embodiments, the recombinant adenovirus is based upon a chimpanzee adenovirus such as ChAdOx 1 (see, e.g., WO 2012/172277), or ChAdOx 2 (see, e.g., WO 2018/215766). In certain embodiments, the recombinant adenovirus is based upon a chimpanzee adenovirus such as BZ28 (see, e.g., WO 2019/086466). In certain embodiments, the recombinant adenovirus is based upon a gorilla adenovirus such as BLY6 (see, e.g., WO 2019/086456), or BZ1 (see, e.g., WO 2019/086466).

[0064] In a preferred embodiment of the invention, the adenoviral vectors comprise capsid proteins from rare serotypes, e.g. including Ad26. In the typical embodiment, the vector is an rAd26 virus. An “adenovirus capsid protein” refers to a protein on the capsid of an adenovirus (e.g., Ad26, Ad35, rAd48, rAd5HVR48 vectors) that is involved in determining the serotype and/or tropism of a particular adenovirus. Adenoviral capsid proteins typically include the fiber, penton and/or hexon proteins. As used herein a “capsid protein” for a particular adenovirus, such as an “Ad26 capsid protein” can be, for example, a chimeric capsid protein that includes at least a part of an Ad26 capsid protein. In certain embodiments, the capsid protein is an entire capsid protein of Ad26. In certain embodiments, the hexon, penton, and fiber are of Ad26.

[0065] One of ordinary skill in the art will recognize that elements derived from multiple serotypes can be combined in a single recombinant adenovirus vector. Thus, a chimeric adenovirus that combines desirable properties from different serotypes can be produced. Thus, in some embodiments, a chimeric adenovirus of the invention could combine the absence of pre-existing immunity of a first serotype with characteristics such as temperature stability, assembly, anchoring, production yield, redirected or improved infection, stability of the DNA in the target cell, and the like. See for example WO 2006/040330 for chimeric adenovirus Ad5HVR48, that includes an Ad5 backbone having partial capsids from Ad48, and also e.g. WO 2019/086461 for chimeric adenoviruses Ad26HVRPtr1, Ad26HVRPtr12, and Ad26HVRPtr13, that include an Ad26 virus backbone having partial capsid proteins of Ptr1, Ptr12, and Ptr13, respectively)

[0066] In certain preferred embodiments the recombinant adenovirus vector useful in the invention is derived mainly or entirely from Ad26 (i.e., the vector is rAd26). In some embodiments, the adenovirus is replication deficient, e.g., because it contains a deletion in the E1 region of the genome. For adenoviruses being derived from non-group C adenovirus, such as Ad26 or Ad35, it is typical to exchange the E4-orf6 coding sequence of the adenovirus with the E4-orf6 of an adenovirus of human subgroup C such as Ad5. This allows propagation of such adenoviruses in well-known complementing cell lines that express the E1 genes of Ad5, such as for example 293 cells, PER.C6 cells, and the like (see, e.g., Havenga, et al., 2006, J Gen Virol 87: 2135-43; WO 03/104467). However, such adenoviruses will not be capable of replicating in non-complementing cells that do not express the E1 genes of Ad5.

[0067] The preparation of recombinant adenoviral vectors is well known in the art. Preparation of rAd26 vectors is described, for example, in WO 2007/104792 and in Abbink et al., (2007) Virol 81(9): 4654-63. Exemplary genome sequences of Ad26 are found in GenBank Accession EF 153474 and in SEQ ID NO: 1 of WO 2007/104792. Examples of vectors useful for the invention for instance include those described in WO2012/082918, the disclosure of which is incorporated herein by reference in its entirety.

[0068] Typically, a vector useful in the invention is produced using a nucleic acid comprising the entire recombinant adenoviral genome (e.g., a plasmid, cosmid, or baculovirus vector). Thus, the invention also provides isolated nucleic acid molecules that encode the adenoviral vectors of the invention. The nucleic acid molecules of the invention can be in the form of RNA or in the form of DNA obtained by cloning or produced synthetically. The DNA can be double-stranded or single-stranded.

[0069] The adenovirus vectors useful in the invention are typically replication deficient. In these embodiments, the virus is rendered replication deficient by deletion or inactivation of regions critical to replication of the virus, such as the E1 region. The regions can be substantially deleted or inactivated by, for example, inserting a gene of interest, such as a gene encoding the stabilized pre-fusion PIV3 F protein (usually linked to a promoter), or a gene encoding the pre-fusion PIV3 F protein fragment (usually linked to a promoter) within the region. In some embodiments, the vectors of the invention can contain deletions in other regions, such as the E2, E3 or E4 regions, or insertions of heterologous genes linked to a promoter within one or more of these regions. For E2- and/or E4-mutated adenoviruses, generally E2- and/or E4-complementing cell lines are used to generate recombinant adenoviruses. Mutations in the E3 region of the adenovirus need not be complemented by the cell line, since E3 is not required for replication.

[0070] A packaging cell line is typically used to produce sufficient amounts of adenovirus vectors for use in the invention. A packaging cell is a cell that comprises those genes that have been deleted or inactivated in a replication deficient vector, thus allowing the virus to replicate in the cell. Suitable packaging cell lines for adenoviruses with a deletion in the E1 region include, for example, PER.C6, 911, 293, and E1 A549.

[0071] In a preferred embodiment of the invention, the vector is an adenovirus vector, and more preferably a rAd26 vector, most preferably a rAd26 vector with at least a deletion in the E1 region of the adenoviral genome, e.g. such as that described in Abbink, J Virol, 2007. 81(9): p. 4654-63, which is incorporated herein by reference. Typically, the nucleic acid sequence encoding the pre-fusion PIV3 F protein is cloned into the E1 and/or the E3 region of the adenoviral genome.

[0072] Host cells comprising the nucleic acid molecules encoding the pre-fusion PIV3 F proteins form also part of the invention. The pre-fusion PIV3 F proteins may be produced through recombinant DNA technology involving expression of the molecules in host cells, e.g. Chinese hamster ovary (CHO) cells, tumor cell lines, BHK cells, human cell lines such as HEK293 cells, PER.C6 cells, or yeast, fungi, insect cells, and the like, or transgenic animals or plants. In certain embodiments, the cells are from a multicellular organism, in certain embodiments they are of vertebrate or invertebrate origin. In certain embodiments, the cells are mammalian cells. In certain embodiments, the cells are human cells. In general, the production of a recombinant proteins, such the pre-fusion PIV3 F proteins of the invention, in a host cell comprises the introduction of a heterologous nucleic acid molecule encoding the protein in expressible format into the host cell, culturing the cells under conditions conducive to expression of the nucleic acid molecule and allowing expression of the protein in said cell. The nucleic acid molecule encoding a protein in expressible format may be in the form of an expression cassette, and usually requires sequences capable of bringing about expression of the nucleic acid, such as enhancer(s), promoter, polyadenylation signal, and the like. The person skilled in the art is aware that various promoters can be used to obtain expression of a gene in host cells. Promoters can be constitutive or regulated, and can be obtained from various sources, including viruses, prokaryotic, or eukaryotic sources, or artificially designed.

[0073] Cell culture media are available from various vendors, and a suitable medium can be routinely chosen for a host cell to express the protein of interest, here the pre-fusion PIV3 F proteins. The suitable medium may or may not contain serum.

[0074] A “heterologous nucleic acid molecule” (also referred to herein as ‘transgene’) is a nucleic acid molecule that is not naturally present in the host cell. It is introduced into for instance a vector by standard molecular biology techniques. A transgene is generally operably linked to expression control sequences. This can for instance be done by placing the nucleic acid encoding the transgene(s) under the control of a promoter. Further regulatory sequences may be added. Many promoters can be used for expression of a transgene(s), and are known to the skilled person, e.g. these may comprise viral, mammalian, synthetic promoters, and the like. A non-limiting example of a suitable promoter for obtaining expression in eukaryotic cells is a CMV-promoter (U.S. Pat. No. 5,385,839), e.g. the CMV immediate early promoter, for instance comprising nt. −735 to +95 from the CMV immediate early gene enhancer/promoter. A polyadenylation signal, for example the bovine growth hormone poly A signal (U.S. Pat. No. 5,122,458), may be present behind the transgene(s). Alternatively, several widely used expression vectors are available in the art and from commercial sources, e.g. the pcDNA and pEF vector series of Invitrogen, pMSCV and pTK-Hyg from BD Sciences, pCMV-Script from Stratagene, etc, which can be used to recombinantly express the protein of interest, or to obtain suitable promoters and/or transcription terminator sequences, poly A sequences, and the like.

[0075] The cell culture can be any type of cell culture, including adherent cell culture, e.g. cells attached to the surface of a culture vessel or to microcarriers, as well as suspension culture. Most large-scale suspension cultures are operated as batch or fed-batch processes because they are the most straightforward to operate and scale up. Nowadays, continuous processes based on perfusion principles are becoming more common and are also suitable. Suitable culture media are also well known to the skilled person and can generally be obtained from commercial sources in large quantities, or custom-made according to standard protocols. Culturing can be done for instance in dishes, roller bottles or in bioreactors, using batch, fed-batch, continuous systems and the like. Suitable conditions for culturing cells are known (see e.g. Tissue Culture, Academic Press, Kruse and Paterson, editors (1973), and R.I. Freshney, Culture of animal cells: A manual of basic technique, fourth edition (Wiley-Liss Inc., 2000, ISBN 0-471-34889-9)).

[0076] The invention further provides compositions comprising a pre-fusion PIV3 F protein, and/or fragment thereof, and/or a nucleic acid molecule, and/or a vector, as described herein. The invention thus provides compositions comprising a pre-fusion PIV3 F protein, or fragment thereof, that displays an epitope that is present in a pre-fusion conformation of the PIV3 F protein but is absent in the post-fusion conformation. The invention also provides compositions comprising a nucleic acid molecule and/or a vector, encoding such pre-fusion PIV3 F protein or fragment. The invention further provides pharmaceutical compositions, e.g. vaccine compositions, comprising a pre-fusion PIV3 F protein, a PIV3 F protein fragment, and/or a nucleic acid molecule, and/or a vector, as described above and one or more pharmaceutically acceptable excipients.

[0077] The invention also provides the use of a stabilized pre-fusion PIV3 F protein (fragment), a nucleic acid molecule, and/or a vector, according to the invention, for inducing an immune response against PIV3 F protein in a subject. Further provided are methods for inducing an immune response against PIV3 F protein in a subject, comprising administering to the subject a pre-fusion PIV3 F protein (fragment), and/or a nucleic acid molecule, and/or a vector, according to the invention. Also provided are pre-fusion PIV3 F protein (fragments), nucleic acid molecules, and/or vectors, according to the invention for use in inducing an immune response against PIV3 F protein in a subject. Further provided is the use of the pre-fusion PIV3 F protein (fragments), and/or nucleic acid molecules, and/or vectors according to the invention for the manufacture of a medicament for use in inducing an immune response against PIV3 F protein in a subject. The invention in particular provides pre-fusion PIV3 F protein (fragments), and/or nucleic acid molecules, and/or vectors according to the invention for use as a vaccine.

[0078] The pre-fusion PIV3 F protein (fragments), nucleic acid molecules, or vectors of the invention may be used for prevention (prophylaxis) and/or treatment of PIV3 infections. In certain embodiments, the prevention and/or treatment may be targeted at patient groups that are susceptible PIV3 infection. Such patient groups include, but are not limited to e.g., the elderly (e.g. >50 years old, >60 years old, and preferably >65 years old), the young (e.g. ≤ 5 years old, ≤ 1 year old), pregnant women (for maternal immunization), and hospitalized patients and patients who have been treated with an antiviral compound but have shown an inadequate antiviral response.

[0079] The pre-fusion PIV3 F proteins, fragments, nucleic acid molecules and/or vectors according to the invention may be used in stand-alone treatment and/or prophylaxis of a disease or condition caused by PIV3, or in combination with other prophylactic and/or therapeutic treatments, such as (existing or future) vaccines, antiviral agents and/or monoclonal antibodies.

[0080] The invention further provides methods for preventing and/or treating PIV3 infection in a subject utilizing the pre-fusion PIV3 F proteins or fragments thereof, nucleic acid molecules and/or vectors according to the invention. In a specific embodiment, a method for preventing and/or treating PIV3 infection in a subject comprises administering to a subject in need thereof an effective amount of a pre-fusion PIV3 F protein (fragment), nucleic acid molecule and/or a vector, as described above. A therapeutically effective amount refers to an amount of a protein, nucleic acid molecule or vector, that is effective for preventing, ameliorating and/or treating a disease or condition resulting from infection by PIV3. Prevention encompasses inhibiting or reducing the spread of PIV3 or inhibiting or reducing the onset, development or progression of one or more of the symptoms associated with infection by PIV3. Amelioration as used in herein may refer to the reduction of visible or perceptible disease symptoms, viremia, or any other measurable manifestation of PIV3 infection.

[0081] For administering to subjects, such as humans, the invention may employ pharmaceutical compositions comprising a pre-fusion PIV3 F protein (fragment), a nucleic acid molecule and/or a vector as described herein, and a pharmaceutically acceptable carrier or excipient. In the present context, the term “pharmaceutically acceptable” means that the carrier or excipient, at the dosages and concentrations employed, will not cause any unwanted or harmful effects in the subjects to which they are administered. Such pharmaceutically acceptable carriers and excipients are well known in the art (see Remington's Pharmaceutical Sciences, 18th edition, A. R. Gennaro, Ed., Mack Publishing Company [1990]; Pharmaceutical Formulation Development of Peptides and Proteins, S. Frokjaer and L. Hovgaard, Eds., Taylor & Francis [2000]; and Handbook of Pharmaceutical Excipients, 3rd edition, A. Kibbe, Ed., Pharmaceutical Press [2000]). The PIV3 F proteins, or nucleic acid molecules, preferably are formulated and administered as a sterile solution although it may also be possible to utilize lyophilized preparations. Sterile solutions are prepared by sterile filtration or by other methods known per se in the art. The solutions are then lyophilized or filled into pharmaceutical dosage containers. The pH of the solution generally is in the range of pH 3.0 to 9.5, e.g. pH 5.0 to 7.5. The PIV3 F proteins typically are in a solution having a suitable pharmaceutically acceptable buffer, and the composition may also contain a salt. Optionally stabilizing agent may be present, such as albumin. In certain embodiments, detergent is added. In certain embodiments, the PIV3 F proteins may be formulated into an injectable preparation.

[0082] In certain embodiments, a composition according to the invention further comprises one or more adjuvants. Adjuvants are known in the art to further increase the immune response to an applied antigenic determinant. The terms “adjuvant” and “immune stimulant” are used interchangeably herein and are defined as one or more substances that cause stimulation of the immune system. In this context, an adjuvant is used to enhance an immune response to the PIV3 F proteins of the invention. Examples of suitable adjuvants include aluminium salts such as aluminium hydroxide and/or aluminium phosphate; oil-emulsion compositions (or oil-in-water compositions), including squalene-water emulsions, such as MF59 (see e.g. WO 90/14837); saponin formulations, such as for example QS21 and Immunostimulating Complexes (ISCOMS) (see e.g. U.S. Pat. No. 5,057,540; WO 90/03184, WO 96/11711, WO 2004/004762, WO 2005/002620); bacterial or microbial derivatives, examples of which are monophosphoryl lipid A (MPL), 3-O-deacylated MPL (3dMPL), CpG-motif containing oligonucleotides, ADP-ribosylating bacterial toxins or mutants thereof, such as E. coli heat labile enterotoxin LT, cholera toxin CT, and the like; eukaryotic proteins (e.g. antibodies or fragments thereof (e.g. directed against the antigen itself or CDla, CD3, CD7, CD80) and ligands to receptors (e.g. CD40L, GMCSF, GCSF, etc), which stimulate immune response upon interaction with recipient cells. In certain embodiments the compositions of the invention comprise aluminium as an adjuvant, e.g. in the form of aluminium hydroxide, aluminium phosphate, aluminium potassium phosphate, or combinations thereof, in concentrations of 0.05-5 mg, e.g. from 0.075-1.0 mg, of aluminium content per dose.

[0083] In other embodiments, the compositions do not comprise adjuvants.

[0084] In certain embodiments, the invention provides methods for making a vaccine against respiratory syncytial virus (PIV3), comprising providing an PIV3 F protein (fragment), nucleic acid or vector according to the invention and formulating it into a pharmaceutically acceptable composition. The term “vaccine” refers to an agent or composition containing an active component effective to induce a certain degree of immunity in a subject against a certain pathogen or disease, which will result in at least a decrease (up to complete absence) of the severity, duration or other manifestation of symptoms associated with infection by the pathogen or the disease. In the present invention, the vaccine comprises an effective amount of a pre-fusion PIV3 F protein (fragment) and/or a nucleic acid molecule encoding a pre-fusion PIV3 F protein, and/or a vector comprising said nucleic acid molecule, which results in an effective immune response against PIV3. This provides a method of preventing serious lower respiratory tract disease leading to hospitalization and the decrease in frequency of complications such as pneumonia and bronchiolitis due to PIV3 infection and replication in a subject. The term “vaccine” according to the invention implies that it is a pharmaceutical composition, and thus typically includes a pharmaceutically acceptable diluent, carrier or excipient. It may or may not comprise further active ingredients. In certain embodiments it may be a combination vaccine that further comprises other components that induce an immune response, e.g. against other proteins of PIV3 and/or against other infectious agents, e.g. against RSV, HMPV and/or influenza. The administration of further active components may for instance be done by separate administration or by administering combination products of the vaccines of the invention and the further active components.

[0085] Administration of the compositions according to the invention can be performed using standard routes of administration. Non-limiting embodiments include parenteral administration, such as intradermal, intramuscular, subcutaneous, transcutaneous, or mucosal administration, e.g. intranasal, oral, and the like. In one embodiment a composition is administered by intramuscular injection. The skilled person knows the various possibilities to administer a composition, e.g. a vaccine in order to induce an immune response to the antigen(s) in the vaccine.

[0086] A subject as used herein preferably is a mammal, for instance a rodent, e.g. a mouse, a cotton rat, or a non-human-primate, or a human. Preferably, the subject is a human subject.

[0087] The proteins, fragments, nucleic acid molecules, vectors, and/or compositions may also be administered, either as prime, or as boost, in a homologous or heterologous prime-boost regimen. If a boosting vaccination is performed, typically, such a boosting vaccination will be administered to the same subject at a time between one week and one year, preferably between two weeks and four months, after administering the composition to the subject for the first time (which is in such cases referred to as ‘priming vaccination’). In certain embodiments, the administration comprises a prime and at least one booster administration.

[0088] The invention further provides methods for making a vaccine against PIV3, comprising providing a recombinant human adenovirus of serotype 26 that comprises nucleic acid encoding a pre-fusion PIV3 F protein or fragment thereof as described herein, propagating said recombinant adenovirus in a culture of host cells, isolating and purifying the recombinant adenovirus, and bringing the recombinant adenovirus in a pharmaceutically acceptable composition. In certain embodiments, provided herein are methods of producing an adenoviral particle comprising a nucleic acid molecule encoding a PIV3 F protein or fragment thereof (transgene). The methods comprise (a) contacting a host cell of the invention with an adenoviral vector of the invention and (b) growing the host cell under conditions wherein the adenoviral particle comprising the transgene is produced. Recombinant adenovirus can be prepared and propagated in host cells, according to well-known methods, which entail cell culture of the host cells that are infected with the adenovirus. The cell culture can be any type of cell culture, including adherent cell culture, e.g. cells attached to the surface of a culture vessel or to microcarriers, as well as suspension culture.

[0089] Most large-scale suspension cultures are operated as batch or fed-batch processes because they are the most straightforward to operate and scale up. Nowadays, continuous processes based on perfusion principles are becoming more common and are also suitable (see, e.g., WO 2010/060719, and WO 2011/098592, both incorporated by reference herein, which describe suitable methods for obtaining and purifying large amounts of recombinant adenoviruses).

[0090] The invention further provides an isolated recombinant nucleic acid that forms the genome of a recombinant human adenovirus of serotype 26 that comprises nucleic acid encoding a PIV3 F protein or fragment thereof, as described herein.

[0091] In addition, the proteins of the invention may be used as diagnostic tool, for example to test the immune status of an individual by establishing whether there are antibodies in the serum of such individual capable of binding to the protein of the invention. The invention thus also relates to an in vitro diagnostic method for detecting the presence of an PIV3 infection in a patient said method comprising the steps of a) contacting a biological sample obtained from said patient with a protein according to the invention; and b) detecting the presence of antibody-protein complexes.

[0092] The invention is further illustrated in the following examples. The examples do not limit the invention in any way. They merely serve to clarify the invention.

### EXAMPLES

### Example 1: Instability of Soluble PIV3 F Ectodomain Protein

[0093] A plasmid encoding the wildtype PIV3 F protein ectodomain in which the transmembrane and cytoplasmic tail were replaced with a C-tag (SEQ ID NO: 2) was synthesized and codon-optimized at Genscript. The construct was cloned into pCDNA2004 by standard methods widely known within the field involving site-directed mutagenesis and PCR and sequenced. The protein was expressed in the expi293F cell system. Expi293F cells were transiently transfected using ExpiFectamine (Life Technologies) according to the manufacturer's instructions and cultured for 3 days at 37° C. and 10% CO2. The culture supernatant was collected, and cells and cellular debris were removed by centrifugation for 5 minutes at 300 g. The clarified supernatant was subsequently sterile filtered using a 0.22 um vacuum filter and stored at 4° C. until use.

[0094] PIV3 F protein ectodomain was detected in crude supernatants using biolayer interferometry (BLI) measurements using quantitative Octet measurements with prefusion-specific monoclonal antibody PIA174 (Stewart-Jones et al., PNAS 115 (48) 12265-12270, 2018) immobilized to anti-human IgG sensors. While a low but distinct signal for wildtype (i.e. unstabilized) PIV3 preF protein was present at day of harvest (day 0), it was undetectable after 20 day storage at 4° ° C. (FIG. 2; wildtype).

### Example 2: Stabilizing Mutations Analyzed with Biolayer Interferometry and Analytical SEC

[0095] In order to stabilize the labile pre-fusion conformation of PIV3 F protein the ectodomain of PIV3 F was C-terminally fused to a GCN4 trimerization motif (SEQ ID NO: 3) and the amino acid residue Asp at position 452 was mutated into Asn (D452N). Next, additional mutations were introduced in this background as indicated in FIG. 2. Plasmids coding for the recombinant PIV3 F protein ectodomains equipped with a C-tag were expressed in Expi293Fcells, and 3 days after transfection the supernatants were tested for binding to PIA174 using quantitative Octet (FIG. 2). The variants showed binding to the prefusion trimer-specific Mab PIA174 at the day of harvest and the binding was maintained after storage at 4ºC for 20 days. Addition of the D452N mutation and GCN4 stabilized the prefusion conformation. The additional stabilizing mutations S41P, (Q89M+Q222I), V165P, N167P, L168P, Q198L, F335P, (S186C+A195C) and (G85C+L221C) increased the amount of prefusion PIV3 F protein in the crude cell supernatant, as compared to the construct with the D452N mutation only and also retained the prefusion conformation for 20 days in supernatant stored at 4° C.

[0096] The cell culture supernatants of the different PIV3 F constructs with stabilizing mutations were analyzed using analytical size exclusion chromatography (SEC) (FIG. 3) at day of harvest. An ultra high-performance liquid chromatography system (Vanquish, Thermo Scientific) and uDAWN TREOS instrument (Wyatt) coupled to an Optilab uT-rEX Refractive Index Detector (Wyatt), in combination with an in-line Nanostar DLS reader (Wyatt), was used for performing the analytical SEC experiment. The cleared crude cell culture supernatants were applied to to a 300 Å column, (Sepax Cat #231300-4615) with the corresponding guard column (Sepax) equilibrated in running buffer (150 mM sodium phosphate, 50 mM NaCl, pH 7.0) at 0.35 mL/min. When analyzing supernatant samples, uMALS detectors were offline and analytical SEC data was analyzed using Chromeleon 7.2.8.0 software package. As was shown for the antibody binding studies described above, also the SEC analysis showed increase in trimer content upon introduction of the stabilizing mutations. Compared to either wildtype (SEQ ID NO: 2) or a variant with only GCN4 trimerization domain and D452N substitution (PIV171432; SEQ ID NO: 4), the variants with additional stabilizing substitutions showed higher trimer content according to analytical SEC of culture supernatant (FIG. 3). Compared with the soluble F variant with D452N and a C-terminal GCN4 domain, the variants with additional stabilizing substitutions S41P, (Q89M+Q2221), V165P, N167P, L168P, Q198L, F335P, (S186C+A195C) and (G85C+L221C) showed higher trimer content according to analytical SEC of culture supernatant (FIG. 3).

### Example 3: Analysis of Additive and Synergistic Stabilizing Mutations by Biolayer Interferometry

[0097] In order to further stabilize the labile pre-fusion conformation of PIV3 F protein ectodomains, constructs were made with additional mutations at amino acid residue positions 41, 89, 165, 167, 168, 198, 204, 222, 335, 367, and/or 436 in a D452N background (all constructs thus comprised the D452N mutation). Plasmids coding for these recombinant PIV3 F protein ectodomains which were C-terminally fused to a GCN4 (SEQ ID NO: 3) and equipped with a C-tag were expressed in Expi293Fcells, and 3 days after transfection the supernatants were tested for binding to PIA174 using quantitative Octet (FIG. 4). The variants showed binding to the prefusion trimer-specific Mab PIA174 at the day of harvest. Moreover, many of the double mutations had higher binding than each individual single mutation at position 41, 165, 167, 168, 198, 204, 335, 367 and 436 or the double mutation at 89+222 in the D452N background, indicating additive or even synergistic stabilizing effects.

[0098] In order to further stabilize the PIV3 F protein ectodomain with the D452N+(Q89M+Q2221)+L168P mutations (i.e. PIV200309, SEQ ID NO:76) the previously mentioned stabilizing mutations were added in different combinations. Plasmids coding for these recombinant PIV3 F protein ectodomains which were C-terminally fused to a GCN4 and equipped with a C-tag were expressed in Expi293Fcells, and 3 days after transfection the supernatants were diluted 5-fold in mock transfected medium and tested for binding to PIA 174 using quantitative Octet (FIG. 5). The variants showed binding to the prefusion trimer-specific Mab PIA174 at the day of harvest, with highest binding observed for PIV200884 (SEQ ID NO: 108) (Q89M/Q222I+L168P+S41P+N167P+D452N).

### Example 4: Stabilizing Mutations in the Stem Allow Removal of GCN4 Trimerization Domain while Retaining Trimer Organization as Analyzed with Biolayer Interferometry and Analytical SEC

[0099] In order to stabilize the labile trimeric pre-fusion conformation of PIV3 F protein ectodomain in the absence of GCN4, amino acid residues at position 470 and 477 were mutated in the stem region (residues 452-481) of the PIV3 protein. Plasmids coding for a recombinant PIV3 F protein ectodomains which were equipped with a C-tag were expressed in Expi293Fcells, and 3 days after transfection the supernatants were tested for binding to PIA174 using quantitative Octet (FIG. 6A). The PIV3 backbone used was stabilized using D452N+Q89M+Q2221+L168P mutations without a GCN4 trimerization domain (PIV200941). Variants of PIV200941 that included 470V and/or 477V showed binding to the trimer-specific Mab PIA174, while a construct with wildtype amino acids at positions 470 and 477 showed only little prefusion trimer in supernatant. Therefore, addition of the 470V and 477V mutation stabilized the native trimeric quaternary structure of the prefusion F protein without a GCN4 trimerization domain.

[0100] The cell culture supernatants of the different PIV3 F constructs with the 470V and/or 477V stabilizing mutations were analyzed using analytical size exclusion chromatography (SEC) (FIG. 7B) at day of harvest. Compared to a variant without stabilizing mutations in the stem and without GCN4 trimerization domain (PIV200941; comprising the D452N+Q89M+Q222I+L168P stabilizing mutations in the head domain), the variants with 470V and/or 477V stabilizing mutations showed higher trimer content according to analytical SEC of culture supernatant (FIG. 6B).

[0101] S470V and S477V were also studied in a wildtype backbone without GCN4 trimerization domain and without stabilizing mutations (PIV190058) (FIG. 6C). Introduction of S470V (PIV200960) or S477V (PIV200962) improved binding to PIA174, indicating that these mutations stabilize the pre-fusion conformation without any additional mutation or heterologous trimerization domain.

### Example 5: Combining Stabilizing Mutations in Head (Residues 19-451) and Stem (Residues 452-481) Increases Expression and Stability of Prefusion PIV3 F Protein as Determined by Biolayer Interferometry, Analytical SEC and Differential Scanning Fluorimetry

[0102] In order to stabilize the labile trimeric pre-fusion conformation of PIV3 F protein ectodomains in the absence of GCN4, the amino acid residues at position 41, 89, 167, 168, 222, 335, 452, 470 and/or 477 were mutated. Plasmids coding for the recombinant PIV3 F protein ectodomains which were equipped with a C-tag were expressed in Expi293Fcells, and 3 days after transfection the supernatants were tested for binding to PIA174 using quantitative Octet (FIG. 7A) and analytical SEC (FIG. 7B). In the absence of 470V and 477V the protein runs at a lower retention time, indicating that the protein is larger. MALS analysis of PIV201113 and PIV201105 (FIG. 8) shows that there is no significant difference in molecular weight (165 vs 156 kDa, respectively). The lower retention time of PIV201113 is presumably because of opening up of the stem region, increasing the proteins apparent size which will be partly trimerized at the apex but not as compact as PIV201105 which will also be trimerized at the base by the optimized stem mutations. The amino acids 470V and/or 477V are thus required to keep the protein in a native trimeric conformation in absence of a heterologous trimerization domain.

[0103] In addition, the stability of the different proteins in supernatant was determined by incubating the samples at 4° C., 50° C. or 60° C. for 30 minutes in a heat block. The samples were then spun at 15.000 rpm for 10 minutes to remove larger aggregates and the supernatant was run on analytical SEC (FIG. 9). Without 470V the protein already loses trimer conformation at 50° C. Without 477V the protein loses trimer conformation at 60° C. Absence of 41P also reduces stability of the protein as the trimer peak is completely gone after 30 min incubation at 60° C.

[0104] Stability of the different proteins in supernatant was also determined by measuring the melting temperature (Tm) using differential scanning fluorimetry (DSF). To this end, SYPRO Orange 5000x (S6650, Invitrogen) was diluted in PBS (1:250) to obtain a 20x working solution. For each reaction, 15 μL of the supernatant was mixed with 5 μL of the SYPRO 20x in a MicroAmp Fast Optical 96-well plate (4346906, ThermoFisher). PBS was used as a negative control. The plate was covered with a MicroAmp Optical Adhesive Film (4311971, ThermoFisher) and was subsequently read in a ViiA7 Real-time PCR machine. The construct with all stabilizing mutations (S41P+Q89M+Q2221+N167P+L168P+D452N+S470V+S477V+F335P) and without GCN4 had a Tm50 of 70.7° C. (′Backbone+F335P′ FIG. 10). Removal of 335P reduced the Tm50 to 66.4° C. (FIG. 10). Additional removal of 470V and/or 477V drastically reduced the Tm50 to <59ºC. Further removal of 41P or 89M+222I reduced the Tm to 61.1° C. and 64.7° ° C., respectively. This indicates that especially S470V and S477V are required for a stable soluble trimer in the absence of a GCN4 trimerization domain. In addition, S41P, F335P and Q89M+Q2221 increase the melting temperature and are thus further stabilizing the protein.

### Example 6: Characterization of Purified PIV3 F Protein as Determined by SDS-PAGE, Analytical SEC and Differential Scanning Fluorimetry

[0105] A set of PIV3 F designs (overview in FIG. 11A) was transiently transfected in expi293 cells using ExpiFectamine (Life Technologies) according to the manufacturer's instructions and cultured for 5 days at 37ºC and 10% CO2. The culture supernatant was harvested and spun for 10 minutes at 600 g to remove cells and cellular debris. The spun supernatant was subsequently sterile filtered using a 0.22 um vacuum filter and stored at 4° C. until use. PIV3 F proteins were purified using a two-step purification protocol including CaptureSelect™ C-tag affinity column, followed by size-exclusion chromatography using a HiLoad Superdex200 pg 16/600column (GE Healthcare).

[0106] Yield for each protein design in mg/L after purification are indicated in FIG. 11A. Purified proteins were analyzed under reducing and non-reducing conditions on SDS-PAGE and developed with Coomassie (FIG. 11B). The proteins ran as a single, non-processed, band, indicating that cleavage at the F2/F1 boundary does not take place in expiHEK cells. SEC-MALS showed a clean trace with a sharp peak at the size of the PIV3 F trimer (FIG. 11C). Differential scanning fluorimetry (DSF) showed that designs that include F335P (PIV201255 and PIV201256) show a 3.6-3.8° C. increase in melting temperature compared to their counterparts without F335P (PIV201254 and PIV201110, respectively) (FIG. 11D).

### Example 7: Stabilizing Mutations S470V+S477V in the HR2 Stem are Sufficient for Trimer Formation as Analyzed with Biolayer Interferometry and Analytical SEC

[0107] In order to stabilize the labile trimeric pre-fusion conformation of PIV3 F protein ectodomain in the absence of GCN4, amino acid residues at position 470 and 477 were mutated in the stem region (residues 452-481) of the PIV3 protein. Plasmids coding for a recombinant PIV3 F protein ectodomains which were equipped with a C-tag were expressed in Expi293Fcells, and 3 days after transfection the supernatants were tested for binding to PIA174 using quantitative Octet as described in example 1 (FIG. 12B) and were analyzed for trimer content using analytical size exclusion chromatography (SEC) as described in example 2 (FIG. 12C). A wildtype PIV3 backbone (no stabilizing mutations, no GCN4 trimerization domain; PIV190058) showed no binding to the trimer-specific Mab PIA174 (FIG. 12B) nor a detectable trimer peak in supernatant (FIG. 12C). In contrast, PIA174 Mab binding and a detectable trimer peak was observed upon introduction of the S470V and S477V HR2 stem mutations (PIV210294), demonstrating that addition of the 470V and 477V mutation stabilized the native trimeric quaternary structure of the prefusion F protein without a GCN4 trimerization domain. Subsequent introduction of various head domain mutations (FIG. 12A) increased PIA174 binding in quantitative Octet and improved trimer yield in analytical SEC, compared to S470V+S477V alone. However, head domain mutations alone did not yield detectable trimer binding and trimer expression in supernatant (FIG. 12C, dotted lines), underscoring the importance of HR2 stabilization for the native trimeric quaternary structure of soluble PIV3 prefusion F (FIG. 12C, solid lines).

### Example 8: Contribution of Individual Mutations to the Stability and Yield of PIV3 Prefusion F Design PIV211368

[0108] Expression of PIV3 F protein including head stabilizing mutations S41P, Q89M+Q222I, and L168P and stem stabilizing mutations S470V+S477V (PIV211368) was compared to PIV3 F variants in which single or double mutations were systematically removed by reverting the amino acid to wildtype (indicated in bold in FIG. 13A). Plasmids coding for the recombinant PIV3 F protein ectodomains without a purification tag were expressed in Expi293F cells, and 3 days after transfection the stability of the different proteins in supernatant was determined by measuring the melting temperature (Tm50) using differential scanning fluorimetry (DSF) as described in example 5 (FIG. 13A), and trimer content was assessed in analytical SEC as described in example 2 (FIG. 13B). Head domain mutations that contribute to stability are S41P and Q98M+Q1221, as they have lower melting temperature (respectively 60.8° C. and 63.6)° ° C. than PIV211368 (65.8° C.) when reverted to wildtype. HR2 mutations S470V and S477V similarly contribute to PIV3 F temperature stability, with lower melting temperatures of 50.3° C. and 58.0° C., respectively. In contrast, head domain L168P substitution decreases thermal stability, as shown by an increased melting temperature of 67.1° C. when reverted to wildtype (FIG. 13A).

[0109] Head domain mutations either have little to no impact on PIV3 F trimer content (P41S; PIV211886) or have a positive impact (M89Q+1222Q; PIV211887 and P168L; PIV211890), as demonstrated by decreased trimer peak of wildtype-reverted variants (FIG. 13B).

[0110] In conclusion, in this particular stabilized protein design HR2 substitutions S470V and S477V strongly contribute to PIV3 F protein stability, whereas head domain mutation L168P strongly contributes to trimer expression but not to protein stability. Head domain mutations S41P and Q89M+Q222I contribute to thermal stability and the latter combination also increases trimer yield.

### Example 9: Characterization of Purified Tag-Less PIV3 F Protein as Determined by Analytical SEC, Differential Scanning Fluorimetry and Slow-Freeze Stability

[0111] PIV3 F design PIV211368 without a purification tag and with stabilizing mutations S41P, Q89M/Q222I, L168P, S470V, and S477V was transiently transfected in Expi293F cells using ExpiFectamine (Life Technologies) according to the manufacturer's instructions and cultured for 5 days at 37° C. and 10% CO2. The culture supernatant was harvested and spun for 10 minutes at 600 g to remove cells and cellular debris. The spun supernatant was subsequently sterile filtered using a 0.22 um vacuum filter and stored at 4° C. until use. PIV3 F protein was purified using a two-step purification protocol including ion exchange purification at pH 4.0 and polishing via size exclusion chromatography using a Superdex 200 increase 16/40 column. The trimeric fraction was pooled and further characterized by SEC-MALS (FIG. 14A). Trimer yield, molecular weight and hydrodynamic radius is reported in FIG. 14B. Differential scanning fluorimetry (DSF) showed that purified PIV211368 has a melting temperature of 66.5° C. (FIG. 14B) which is slightly higher compared with the measurement of the protein in crude cell culture supernatant (FIG. 13A). The stability of purified PIV211368 was further tested by slowly freezing the protein from 20° C. to −70° C. during a 24-hour period in various buffer compositions (FB12, PS4P4 and TS5P2). The recovery of PIV3 F trimer after slow freezing was determined in analytical SEC and compared to trimer recovery after 4° ° C. storage. Recovery ranged from 92-98%, indicating minimal trimer loss in any of the tested buffers.

### Example 10: Characterization of Purified C-Tagged PIV3 F Protein as Determined by Analytical SEC and Differential Scanning Fluorimetry

[0112] PIV3 F design PIV210235 equipped with a C-tag and with stabilizing mutations S41P, Q89M/Q222I, S470V, and S477V was transiently transfected in Expi293 GnT1-cells using ExpiFectamine (Life Technologies) according to the manufacturer's instructions and cultured for 5 days at 37° C. and 10% CO2. The culture supernatant was harvested and spun for 10 minutes at 600 g to remove cells and cellular debris. The spun supernatant was subsequently sterile filtered using a 0.22 um vacuum filter and stored at 4° ° C. until use. PIV3 F protein was purified using a two-step purification protocol including CaptureSelect™ C-tag affinity column, followed by size-exclusion chromatography using a Superdex200 10/300 column (GE Healthcare). The trimeric fraction was pooled and further characterized by SEC-MALS (FIG. 15A). Trimer yield, molecular weight and hydrodynamic radius is reported in FIG. 15B. Differential scanning fluorimetry (DSF) showed that purified PIV210235 has a melting temperature of 67.5° C. (FIG. 15B).

TABLE 1
Standard amino acids, abbreviations and properties

| | | | Side chain | Side chain charge |
|---|---|---|---|---|
| Amino Acid | 3-Letter | 1-Letter | polarity | (pH 7.4) |
| alanine | Ala | A | non-polar | Neutral |
| arginine | Arg | R | polar | Positive |
| asparagine | Asn | N | polar | Neutral |
| aspartic acid | Asp | D | polar | Negative |
| cysteine | Cys | C | non-polar | Neutral |
| glutamic acid | Glu | E | polar | Negative |
| glutamine | Gln | Q | polar | Neutral |
| glycine | Gly | G | non-polar | Neutral |
| histidine | His | H | polar | positive(10%) |
| | | | | neutral(90%) |
| isoleucine | Ile | I | non-polar | Neutral |
| leucine | Leu | L | non-polar | Neutral |
| lysine | Lys | K | polar | Positive |
| methionine | Met | M | non-polar | Neutral |
| phenylalanine | Phe | F | non-polar | Neutral |
| proline | Pro | P | non-polar | Neutral |
| serine | Ser | S | polar | Neutral |
| threonine | Thr | T | polar | Neutral |
| tryptophan | Trp | W | non-polar | Neutral |
| tyrosine | Tyr | Y | polar | Neutral |
| valine | Val | V | non-polar | Neutral |

Sequences

Seq NO 1: PIV191469 (full-length, membrane-bound HPIV3 F)
MPISILLIITTMIMASHCQIDITKLQHVGVLVNSPKGMKISQNFETRYLILSLIPKIEDSNSCGDQQIKQYKRLLDRLIIPL
YDGLRLQKDVIVTNQESNENTDPRTERFFGGVIGTIALGVATSAQITAAVALVEAKQARSDIEKLKEAIRDTNKAVQS
VQSSVGNLIVAIKSVQDYVNKEIVPSIARLGCEAAGLQLGIALTQHYSELTNIFGDNIGSLQEKGIKLQGIASLYRTNIT
EIFTTSTVDKYDIYDLLFTESIKVRVIDVDLNDYSITLQVRLPLLTRLLNTQIYKVDSISYNIQNREWYIPLPSHIMTKGAF
LGGADVKECIEAFSSYICPSDPGFVLNHEMESCLSGNISQCPRTTVTSDIVPRYAFVNGGVVANCITTTCTCNGIGNR
INQPPDQGVKIITHKECNTIGINGMLFNTNKEGTLAFYTPDDITLNNSVALDPIDISIELNKAKSDLEESKEWIRRSNQ
KLDSIGSWHQSSTTIIVILIMMIILFIINITIITIAIKYYRIQKRDRVDQNDKPYVLTNK
Seq NO 2: PIV190058 (Wildtype ectodomain, no GCN4, but with a C-tag)
MPISILLIITTMIMASHCQIDITKLQHVGVLVNSPKGMKISQNFETRYLILSLIPKIEDSNSCGDQQIKQYKRLLDRLIIPL
YDGLRLQKDVIVTNQESNENTDPRTERFFGGVIGTIALGVATSAQITAAVALVEAKQARSDIEKLKEAIRDTNKAVQS
VQSSVGNLIVAIKSVQDYVNKEIVPSIARLGCEAAGLQLGIALTQHYSELTNIFGDNIGSLQEKGIKLQGIASLYRTNIT
EIFTTSTVDKYDIYDLLFTESIKVRVIDVDLNDYSITLQVRLPLLTRLLNTQIYKVDSISYNIQNREWYIPLPSHIMTKGAF
LGGADVKECIEAFSSYICPSDPGFVLNHEMESCLSGNISQCPRTTVTSDIVPRYAFVNGGVVANCITTTCTCNGIGNR
INQPPDQGVKIITHKECNTIGINGMLFNTNKEGTLAFYTPDDITLNNSVALDPIDISIELNKAKSDLEESKEWIRRSNQ
KLDSIGGSEPEA
Seq NO 3: GCN4
EDKIEEILSKIYHIENEIARIKK
SEQ ID NO: 4 PIV171432
MPISILLIITTMIMASHCQIDITKLQHVGVLVNSPKGMKISQNFETRYLILSLIPKIEDSNSCGDQQIKQYKRLLDRLIIPL
YDGLRLQKDVIVTNQESNENTDPRTERFFGGVIGTIALGVATSAQITAAVALVEAKQARSDIEKLKEAIRDTNKAVQS
VQSSVGNLIVAIKSVQDYVNKEIVPSIARLGCEAAGLQLGIALTQHYSELTNIFGDNIGSLQEKGIKLQGIASLYRTNIT
EIFTTSTVDKYDIYDLLFTESIKVRVIDVDLNDYSITLQVRLPLLTRLLNTQIYKVDSISYNIQNREWYIPLPSHIMTKGAF
LGGADVKECIEAFSSYICPSDPGFVLNHEMESCLSGNISQCPRTTVTSDIVPRYAFVNGGVVANCITTTCTCNGIGNR
INQPPDQGVKIITHKECNTIGINGMLFNTNKEGTLAFYTPDDITLNNSVALNPIDISIELNKAKSDLEESKEWIRRSNQ
KLDSIEDKIEEILSKIYHIENEIARIKKLIGEAEPEA
SEQ ID NO: 5 PIV190059
MPISILLIITTMIMASHCQIDITKLQHVGVLVNSPKGMKISQNFETRYLILSLIPKIEDSNSCGDQQIKQYKRLLDRLIIPL
YDGLRLQKDVIVTNQESNENTDPRTERFFGGVIGTIALGVATSAQITAAVALVEAKQARSDIEKLKEAIRDTNKAVQS
VQSSVGNLIVAIKSVQDYVNKEIVPSIARLGCEAAGLQLGIALTQHYSELTNIFGDNIGSLQEKGIKLQGIASLYRTNIT
EIFTTSTVDKYDIYDLLFTESIKVRVIDVDLNDYSITLQVRLPLLTRLLNTQIYKVDSISYNIQNREWYIPLPSHIMTKGAF
LGGADVKECIEAFSSYICPSDPGFVLNHEMESCLSGNISQCPRTTVTSDIVPRYAFVNGGVVANCITTTCTCNGIGNR
INQPPDQGVKIITHKECNTIGINGMLFNTNKEGTLAFYTPDDITLNNSVALNPIDISIELNKAKSDLEESKEWIRRSNQ
KLDSIGGSEPEA
SEQ ID NO: 6 PIV191486
MPISILLIITTMIMASHCQIDITKLQHVGVLVNSPKGMKISQNFETRYLILSLIPKIEDSNSCGDQQIKQYKRLLDRLIIPL
YDGLRLQKDVIVTNQESNENTDPRTERFFGGVIGTIALGVATSAQITAAVALVEAKQARSDIEKLKEAIRDTNKAVQS
VQSSPGNLIVAIKSVQDYVNKEIVPCIARLGCEACGLQLGIALTQHYSELTNIFGDNIGSLQEKGIKLQGIASLYRTNIT
EIFTTSTVDKYDIYDLLFTESIKVRVIDVDLNDYSITLQVRLPLLTRLLNTQIYKVDSISYNIQNREWYIPLPSHIMTKGAF
LGGADVKECIEAFSSYICPSDPGFVLNHEMESCLSGNISQCPRTTVTSDIVPRYAFVNGGVVANCITTTCTCNGIGNR
INQPPDQGVKIITHKECNTIGINGMLFNTNKEGTLAFYTPDDITLNNSVALNPIDISIELNKAKSDLEESKEWIRRSNQ
KLDSIEDKIEEILSKIYHIENEIARIKKLIGEAEPEA
SEQ ID NO: 7 PIV191489
MPISILLIITTMIMASHCQIDITKLQHVGVLVNSPKGMKISQNFETRYLILSLIPKIEDSNSCGDQQIKQYKRLLDRLIIPL
YDGLRLQKDVIVTNQESNENTDPRTERFFGGVIGTIALGVATSAQITAAVALVEAKQARSDIEKLKEAIRDTNKAVQS
VQSSPGNLIVAIKSVQDYVNKEIVPCIARLGCEACGLLLGIALTQHYSELTNIFGDNIGSLQEKGIKLQGIASLYRTNITE
IFTTSTVDKYDIYDLLFTESIKVRVIDVDLNDYSITLQVRLPLLTRLLNTQIYKVDSISYNIQNREWYIPLPSHIMTKGAFL
GGADVKECIEAFSSYICPSDPGFVLNHEMESCLSGNISQCPRTTVTSDIVPRYAFVNGGVVANCITTTCTCNGIGNRI
NQPPDQGVKIITHKECNTIGINGMLFNTNKEGTLAFYTPDDITLNNSVALNPIDISIELNKAKSDLEESKEWIRRSNQK
LDSIEDKIEEILSKIYHIENEIARIKKLIGEAEPEA
SEQ ID NO: 8 PIV191501
MPISILLIITTMIMASHCQIDITKLQHVGVLVNSPKGMKISQNFETRYLILSLIPKIEDSNSCGDQQIKQYKRLLDRLIIPL
YDGLRLMKDVIVTNQESNENTDPRTERFFGGVIGTIALGVATSAQITAAVALVEAKQARSDIEKLKEAIRDTNKAVQ
SVQSSVGNLIVAIKSVQDYVNKEIVPSIARLGCEAAGLQLGIALTQHYSELTNIFGDNIGSLIEKGIKLQGIASLYRTNIT
EIFTTSTVDKYDIYDLLFTESIKVRVIDVDLNDYSITLQVRLPLLTRLLNTQIYKVDSISYNIQNREWYIPLPSHIMTKGAF
LGGADVKECIEAFSSYICPSDPGFVLNHEMESCLSGNISQCPRTTVTSDIVPRYAFVNGGVVANCITTTCTCNGIGNR
INQPPDQGVKIITHKECNTIGINGMLFNTNKEGTLAFYTPDDITLNNSVALNPIDISIELNKAKSDLEESKEWIRRSNQ
KLDSIEDKIEEILSKIYHIENEIARIKKLIGEAEPEA
SEQ ID NO: 9 PIV191523
MPISILLIITTMIMASHCQIDITKLQHVGVLVNSPKGMKISQNFETRYLILSLIPKIEDSNSCGDQQIKQYKRLLDRLIIPL
YDGLRLQKDVIVTNQESNENTDPRTERFFGGVIGTIALGVATSAQITAAVALVEAKQARSDIEKLKEAIRDTNKAVQS
VQSSPGNLIVAIKSVQDYVNKEIVPCIARLGCEACGLQLGIALTQHYSELTNIFGDNIGSLQEKGIKLQGIASLYRTNIT
EIFTTSTVDKYDIYDLLFTESIKVRVIDVDLNDYSITLQVRLPLLTRLLNTQIYKVDSISYNIQNREWYIPLPSHIMTKGAF
LGGADVKECIEAFSSYICPSDPGFVLNHEMESCLSGNISQCPRTTVTSDIVPRYAFVNGGVVANCITTTCTCNGIGNR
INQPPDQGVKIITHKECNTIGINGMLFNTNKEGTLAFYTPDDITLNNSVALNPIDVSIELNKVKSDLEEVKEWLRRVN
QKLDSIGSGEPEA
SEQ ID NO: 10 PIV191528
MPISILLIITTMIMASHCQIDITKLQHVGVLVNSPKGMKISQNFETRYLILSLIPKIEDSNSCGDQQIKQYKRLLDRLIIPL
YDGLRLQKDVIVTNQESNENTDPRTERFFGGVIGTIALGVATSAQITAAVALVEAKQARSDIEKLKEAIRDTNKAVQS
VQSSPGNLIVAIKSVQDYVNKEIVPCIARLGCEACGLQLGIALTQHYSELTNIFGDNIGSLQEKGIKLQGIASLYRTNIT
EIFTTSTVDKYDIYDLLFTESIKVRVIDVDLNDYSITLQVRLPLLTRLLNTQIYKVDSISYNIQNREWYIPLPSHIMTKGAF
LGGADVKECIEAFSSYICPSDPGFVLNHEMESCLSGNISQCPRTTVTSDIVPRYAFVNGGVVANCITTTCTCNGIGNR
INQPPDQGVKIITHKECNTIGINGMLFNTNKEGTLAFYTPDDITLNNSVALNPIDVSIELNKVKSKLEDVKEWLRRVN
QKLDSIGSGEPEA
SEQ ID NO: 11 PIV191530
MPISILLIITTMIMASHCQIDITKLQHVGVLVNSPKGMKISQNFETRYLILSLIPKIEDSNSCGDQQIKQYKRLLDRLIIPL
YDGLRLQKDVIVTNQESNENTDPRTERFFGGVIGTIALGVATSAQITAAVALVEAKQARSDIEKLKEAIRDTNKAVQS
VQSSPGNLIVAIKSVQDYVNKEIVPCIARLGCEACGLQLGIALTQHYSELTNIFGDNIGSLQEKGIKLQGIASLYRTNIT
EIFTTSTVDKYDIYDLLFTESIKVRVIDVDLNDYSITLQVRLPLLTRLLNTQIYKVDSISYNIQNREWYIPLPSHIMTKGAF
LGGADVKECIEAFSSYICPSDPGFVLNHEMESCLSGNISQCPRTTVTSDIVPRYAFVNGGVVANCITTTCTCNGIGNR
INQPPDQGVKIITHKECNTIGINGMLFNTNKEGTLAFYTPDDITLNNSVALNPIDISIELNKVKSDLEEVKEWLRRVN
QKLDSIGSGEPEA
SEQ ID NO: 12 PIV191531
MPISILLIITTMIMASHCQIDITKLQHVGVLVNSPKGMKISQNFETRYLILSLIPKIEDSNSCGDQQIKQYKRLLDRLIIPL
YDGLRLQKDVIVTNQESNENTDPRTERFFGGVIGTIALGVATSAQITAAVALVEAKQARSDIEKLKEAIRDTNKAVQS
VQSSPGNLIVAIKSVQDYVNKEIVPCIARLGCEACGLQLGIALTQHYSELTNIFGDNIGSLQEKGIKLQGIASLYRTNIT
EIFTTSTVDKYDIYDLLFTESIKVRVIDVDLNDYSITLQVRLPLLTRLLNTQIYKVDSISYNIQNREWYIPLPSHIMTKGAF
LGGADVKECIEAFSSYICPSDPGFVLNHEMESCLSGNISQCPRTTVTSDIVPRYAFVNGGVVANCITTTCTCNGIGNR
INQPPDQGVKIITHKECNTIGINGMLFNTNKEGTLAFYTPDDITLNNSVALNPIDISIELNKIKSDLEEIKEWLRRVNQK
LDSIGSGEPEA
SEQ ID NO: 13 PIV191551
MPISILLIITTMIMASHCQIDITKLQHVGVLVNSPKGMKISQNFETRYLILSLIPKIEDSNSCGDQQIKQYKRLLDRLIIPL
YDGLRLQKDVIVTNQESNENTDPRTERFFGGVIGTIALGVATSAQITAAVALVEAKQARSDIEKLKEAIRDTNKAVQS
VQSSVGNLIVAIKSVQDYVNKEIVPSIARLGCEAAGLQLGIALTQHYSELTNIFGDNIGSLQEKGIKLQGIASLYRTNIT
EIFTTSTVDKYDIYDLLFTESIKVRVIDVDLNDYSITLQVRLPLLTRLLNTQIYKVDSISYNIQNREWYIPLPSHIMTKGAF
LGGADVKECIEAPSSYICPSDPGFVLNHEMESCLSGNISQCPRTTVTSDIVPRYAFVNGGVVANCITTTCTCNGIGNR
INQPPDQGVKIITHKECNTIGINGMLFNTNKEGTLAFYTPDDITLNNSVALNPIDISIELNKAKSDLEESKEWIRRSNQ
KLDSIEDKIEEILSKIYHIENEIARIKKLIGEAEPEA
SEQ ID NO: 14 PIV191557
MPISILLIITTMIMASHCQIDITKLQHVGVLVNSPKGMKISQNFETRYLILSLIPKIEDSNSCGDQQIKQYKRLLDRLIIPL
YDGLRLQKDVIVTNQESNENTDPRTERFFGGVIGTIALGVATSAQITAAVALVEAKQARSDIEKLKEAIRDTNKAVQS
VQSSVGNPIVAIKSVQDYVNKEIVPSIARLGCEAAGLQLGIALTQHYSELTNIFGDNIGSLQEKGIKLQGIASLYRTNIT
EIFTTSTVDKYDIYDLLFTESIKVRVIDVDLNDYSITLQVRLPLLTRLLNTQIYKVDSISYNIQNREWYIPLPSHIMTKGAF
LGGADVKECIEAFSSYICPSDPGFVLNHEMESCLSGNISQCPRTTVTSDIVPRYAFVNGGVVANCITTTCTCNGIGNR
INQPPDQGVKIITHKECNTIGINGMLFNTNKEGTLAFYTPDDITLNNSVALNPIDISIELNKAKSDLEESKEWIRRSNQ
KLDSIEDKIEEILSKIYHIENEIARIKKLIGEAEPEA
SEQ ID NO: 15 PIV191560
MPISILLIITTMIMASHCQIDITKLQHVGVLVNSPKGMKISQNFETRYLILSLIPKIEDSNSCGDQQIKQYKRLLDRLIIPL
YDGLRLQKDVIVTNQESNENTDPRTERFFGGVIGTIALGVATSAQITAAVALVEAKQARSDIEKLKEAIRDTNKAVQS
VQSSVGPLIVAIKSVQDYVNKEIVPSIARLGCEAAGLQLGIALTQHYSELTNIFGDNIGSLQEKGIKLQGIASLYRTNITE
IFTTSTVDKYDIYDLLFTESIKVRVIDVDLNDYSITLQVRLPLLTRLLNTQIYKVDSISYNIQNREWYIPLPSHIMTKGAFL
GGADVKECIEAFSSYICPSDPGFVLNHEMESCLSGNISQCPRTTVTSDIVPRYAFVNGGVVANCITTTCTCNGIGNRI
NQPPDQGVKIITHKECNTIGINGMLFNTNKEGTLAFYTPDDITLNNSVALNPIDISIELNKAKSDLEESKEWIRRSNQK
LDSIEDKIEEILSKIYHIENEIARIKKLIGEAEPEA
SEQ ID NO: 16 PIV191561
MPISILLIITTMIMASHCQIDITKLQHVGVLVNSPKGMKISQNFETRYLILSLIPKIEDSNSCGDQQIKQYKRLLDRLIIPL
YDCLRLQKDVIVTNQESNENTDPRTERFFGGVIGTIALGVATSAQITAAVALVEAKQARSDIEKLKEAIRDTNKAVQS
VQSSVGNLIVAIKSVQDYVNKEIVPSIARLGCEAAGLQLGIALTQHYSELTNIFGDNIGSCQEKGIKLQGIASLYRTNIT
EIFTTSTVDKYDIYDLLFTESIKVRVIDVDLNDYSITLQVRLPLLTRLLNTQIYKVDSISYNIQNREWYIPLPSHIMTKGAF
LGGADVKECIEAFSSYICPSDPGFVLNHEMESCLSGNISQCPRTTVTSDIVPRYAFVNGGVVANCITTTCTCNGIGNR
INQPPDQGVKIITHKECNTIGINGMLFNTNKEGTLAFYTPDDITLNNSVALNPIDISIELNKAKSDLEESKEWIRRSNQ
KLDSIEDKIEEILSKIYHIENEIARIKKLIGEAEPEA
SEQ ID NO: 17 PIV191580
MPISILLIITTMIMASHCQIDITKLQHVGVLVNSPKGMKIPQNFETRYLILSLIPKIEDSNSCGDQQIKQYKRLLDRLIIPL
YDGLRLQKDVIVTNQESNENTDPRTERFFGGVIGTIALGVATSAQITAAVALVEAKQARSDIEKLKEAIRDTNKAVQS
VQSSVGNLIVAIKSVQDYVNKEIVPSIARLGCEAAGLQLGIALTQHYSELTNIFGDNIGSLQEKGIKLQGIASLYRTNIT
EIFTTSTVDKYDIYDLLFTESIKVRVIDVDLNDYSITLQVRLPLLTRLLNTQIYKVDSISYNIQNREWYIPLPSHIMTKGAF
LGGADVKECIEAFSSYICPSDPGFVLNHEMESCLSGNISQCPRTTVTSDIVPRYAFVNGGVVANCITTTCTCNGIGNR
INQPPDQGVKIITHKECNTIGINGMLFNTNKEGTLAFYTPDDITLNNSVALNPIDISIELNKAKSDLEESKEWIRRSNQ
KLDSIEDKIEEILSKIYHIENEIARIKKLIGEAEPEA
SEQ ID NO: 19 PIV191593
MPISILLIITTMIMASHCQIDITKLQHVGVLVNSPKGMKISQNFETRYLILSLIPKIEDSNSCGDQQIKQYKRLLDRLIIPL
YDGLRLQKDVIVTNQESNENTDPRTERFFGGVIGTIALGVATSAQITAAVALVEAKQARSDIEKLKEAIRDTNKAVQS
VQSSPGNLIVAIKSVQDYVNKEIVPCIARLGCEACGLQLGIALTQHYSELTNIFGDNIGSLQEKGIKLQGIASLYRTNIT
EIFTTSTVDKYDIYDLLFTESIKVRVIDVDLNDYSITLQVRLPLLTRLLNTQIYKVDSISYNIQNREWYIPLPSHIMTKGAF
LGGADVKECIEAFSSYICPSDPGFVLNHEMESCLSGNISQCPRTTVTSDIVPRYAFVNGGVVANCITTTCTCNGIGNR
INQPPDQGVKIITHKECNTIGINGMLFNTNKEGTLAFYTPDDITLNNSVALDPIDISIELNKAKSDLEESKEWIRRSNQ
KLDSIGSGEPEA
SEQ ID NO: 19 PIV191594
MPISILLIITTMIMASHCQIDITKLQHVGVLVNSPKGMKISQNFETRYLILSLIPKIEDSNSCGDQQIKQYKRLLDRLIIPL
YDGLRLQKDVIVTNQESNENTDPRTERFFGGVIGTIALGVATSAQITAAVALVEAKQARSDIEKLKEAIRDTNKAVQS
VQSSPGNLIVAIKSVQDYVNKEIVPCIARLGCEACGLQLGIALTQHYSELTNIFGDNIGSLQEKGIKLQGIASLYRTNIT
EIFTTSTVDKYDIYDLLFTESIKVRVIDVDLNDYSITLQVRLPLLTRLLNTQIYKVDSISYNIQNREWYIPLPSHIMTKGAF
LGGADVKECIEAFSSYICPSDPGFVLNHEMESCLSGNISQCPRTTVTSDIVPRYAFVNGGVVANCITTTCTCNGIGNR
INQPPDQGVKIITHKECNTIGINGMLFNTNKEGTLAFYTPDDITLNNSVALNPIDISIELNKAKSDLEESKEWIRRSNQ
KLDSIGSGEPEA
SEQ ID NO: 20 PIV200253
MPISILLIITTMIMASHCQIDITKLQHVGVLVNSPKGMKIPQNFETRYLILSLIPKIEDSNSCGDQQIKQYKRLLDRLIIPL
YDGLRLQKDVIVTNQESNENTDPRTERFFGGVIGTIALGVATSAQITAAVALVEAKQARSDIEKLKEAIRDTNKAVQS
VQSSVGPLIVAIKSVQDYVNKEIVPSIARLGCEAAGLQLGIALTQHYSELTNIFGDNIGSLQEKGIKLQGIASLYRTNITE
IFTTSTVDKYDIYDLLFTESIKVRVIDVDLNDYSITLQVRLPLLTRLLNTQIYKVDSISYNIQNREWYIPLPSHIMTKGAFL
GGADVKECIEAFSSYICPSDPGFVLNHEMESCLSGNISQCPRTTVTSDIVPRYAFVNGGVVANCITTTCTCNGIGNRI
NQPPDQGVKIITHKECNTIGINGMLFNTNKEGTLAFYTPDDITLNNSVALNPIDISIELNKAKSDLEESKEWIRRSNQK
LDSIEDKIEEILSKIYHIENEIARIKKLIGEAEPEA
SEQ ID NO: 21 PIV200254
MPISILLIITTMIMASHCQIDITKLQHVGVLVNSPKGMKIPQNFETRYLILSLIPKIEDSNSCGDQQIKQYKRLLDRLIIPL
YDGLRLQKDVIVTNQESNENTDPRTERFFGGVIGTIALGVATSAQITAAVALVEAKQARSDIEKLKEAIRDTNKAVQS
VQSSVGNPIVAIKSVQDYVNKEIVPSIARLGCEAAGLQLGIALTQHYSELTNIFGDNIGSLQEKGIKLQGIASLYRTNIT
EIFTTSTVDKYDIYDLLFTESIKVRVIDVDLNDYSITLQVRLPLLTRLLNTQIYKVDSISYNIQNREWYIPLPSHIMTKGAF
LGGADVKECIEAFSSYICPSDPGFVLNHEMESCLSGNISQCPRTTVTSDIVPRYAFVNGGVVANCITTTCTCNGIGNR
INQPPDQGVKIITHKECNTIGINGMLFNTNKEGTLAFYTPDDITLNNSVALNPIDISIELNKAKSDLEESKEWIRRSNQ
KLDSIEDKIEEILSKIYHIENEIARIKKLIGEAEPEA
SEQ ID NO: 22 PIV200255
MPISILLIITTMIMASHCQIDITKLQHVGVLVNSPKGMKIPQNFETRYLILSLIPKIEDSNSCGDQQIKQYKRLLDRLIIPL
YDGLRLQKDVIVTNQESNENTDPRTERFFGGVIGTIALGVATSAQITAAVALVEAKQARSDIEKLKEAIRDTNKAVQS
VQSSVGNLIVAIKSVQDYVNKEIVPSIARLGCEAAGLQLGIALTQHYSELTNIFGDNIGSLQEKGIKLQGIASLYRTNIT
EIFTTSTVDKYDIYDLLFTESIKVRVIDVDLNDYSITLQVRLPLLTRLLNTQIYKVDSISYNIQNREWYIPLPSHIMTKGAF
LGGADVKECIEAFSSYICPSDPGFVLNHEMESCLSGNISQCPRTTVTSDIVPRYAFVNGGVVANCITTTCTCNGIGNR
INQPPDQGVKIITHKECNTIGINGMLFNTNKEGTLPFYTPDDITLNNSVALNPIDISIELNKAKSDLEESKEWIRRSNQ
KLDSIEDKIEEILSKIYHIENEIARIKKLIGEAEPEA
SEQ ID NO: 23 PIV200256
MPISILLIITTMIMASHCQIDITKLQHVGVLVNSPKGMKIPQNFETRYLILSLIPKIEDSNSCGDQQIKQYKRLLDRLIIPL
YDGLRLQKDVIVTNQESNENTDPRTERFFGGVIGTIALGVATSAQITAAVALVEAKQARSDIEKLKEAIRDTNKAVQS
VQSSVGNLIVAIKSVQDYVNKEIVPSIARLGCEAAGLQLGIALTQHYSELTNIFGDNIGSLQEKGIKLQGIASLYRTNIT
EIFTTSTVDKYDIYDLLFTESIKVRVIDVDLNDYSITLQVRLPLLTRLLNTQIYKVDSISYNIQNREWYIPLPSHIMTKGAF
LGGADVKECIEAPSSYICPSDPGFVLNHEMESCLSGNISQCPRTTVTSDIVPRYAFVNGGVVANCITTTCTCNGIGNR
INQPPDQGVKIITHKECNTIGINGMLFNTNKEGTLAFYTPDDITLNNSVALNPIDISIELNKAKSDLEESKEWIRRSNQ
KLDSIEDKIEEILSKIYHIENEIARIKKLIGEAEPEA
SEQ ID NO: 24 PIV200257
MPISILLIITTMIMASHCQIDITKLQHVGVLVNSPKGMKIPQNFETRYLILSLIPKIEDSNSCGDQQIKQYKRLLDRLIIPL
YDGLRLQKDVIVTNQESNENTDPRTERFFGGVIGTIALGVATSAQITAAVALVEAKQARSDIEKLKEAIRDTNKAVQS
VQSSVGNLIVAIKSVQDYVNKEIVPSIARLGCEAAGLQLGIALTQHYSELTNIFGDNIGSLQEKGIKLQGIASLYRTNIT
EIFTTSTVDKYDIYDLLFTESIKVRVIDVDLNDYSITLQVRLPLLTRLLNTQIYKVDSISYNIQNREWYIPLPSHIMTKGAF
LGGADVKECIEAFSSYICPSDPGFVLNHEMESCLSGNISQCPRTLVTSDIVPRYAFVNGGVVANCITTTCTCNGIGNR
INQPPDQGVKIITHKECNTIGINGMLFNTNKEGTLAFYTPDDITLNNSVALNPIDISIELNKAKSDLEESKEWIRRSNQ
KLDSIEDKIEEILSKIYHIENEIARIKKLIGEAEPEA
SEQ ID NO: 25 PIV200258
MPISILLIITTMIMASHCQIDITKLQHVGVLVNSPKGMKIPQNFETRYLILSLIPKIEDSNSCGDQQIKQYKRLLDRLIIPL
YDGLRLQKDVIVTNQESNENTDPRTERFFGGVIGTIALGVATSAQITAAVALVEAKQARSDIEKLKEAIRDTNKAVQS
VQSSPGNLIVAIKSVQDYVNKEIVPSIARLGCEAAGLQLGIALTQHYSELTNIFGDNIGSLQEKGIKLQGIASLYRTNIT
EIFTTSTVDKYDIYDLLFTESIKVRVIDVDLNDYSITLQVRLPLLTRLLNTQIYKVDSISYNIQNREWYIPLPSHIMTKGAF
LGGADVKECIEAFSSYICPSDPGFVLNHEMESCLSGNISQCPRTTVTSDIVPRYAFVNGGVVANCITTTCTCNGIGNR
INQPPDQGVKIITHKECNTIGINGMLFNTNKEGTLAFYTPDDITLNNSVALNPIDISIELNKAKSDLEESKEWIRRSNQ
KLDSIEDKIEEILSKIYHIENEIARIKKLIGEAEPEA
SEQ ID NO: 26 PIV200259
MPISILLIITTMIMASHCQIDITKLQHVGVLVNSPKGMKIPQNFETRYLILSLIPKIEDSNSCGDQQIKQYKRLLDRLIIPL
YDGLRLQKDVIVTNQESNENTDPRTERFFGGVIGTIALGVATSAQITAAVALVEAKQARSDIEKLKEAIRDTNKAVQS
VQSSVGNLIVAIKSVQDYVNKEIVPSIARLGCEAAGLLLGIALTQHYSELTNIFGDNIGSLQEKGIKLQGIASLYRTNITE
IFTTSTVDKYDIYDLLFTESIKVRVIDVDLNDYSITLQVRLPLLTRLLNTQIYKVDSISYNIQNREWYIPLPSHIMTKGAFL
GGADVKECIEAFSSYICPSDPGFVLNHEMESCLSGNISQCPRTTVTSDIVPRYAFVNGGVVANCITTTCTCNGIGNRI
NQPPDQGVKIITHKECNTIGINGMLFNTNKEGTLAFYTPDDITLNNSVALNPIDISIELNKAKSDLEESKEWIRRSNQK
LDSIEDKIEEILSKIYHIENEIARIKKLIGEAEPEA
SEQ ID NO: 27 PIV200260
MPISILLIITTMIMASHCQIDITKLQHVGVLVNSPKGMKIPQNFETRYLILSLIPKIEDSNSCGDQQIKQYKRLLDRLIIPL
YDGLRLQKDVIVTNQESNENTDPRTERFFGGVIGTIALGVATSAQITAAVALVEAKQARSDIEKLKEAIRDTNKAVQS
VQSSVGNLIVAIKSVQDYVNKEIVPSIARLGCEAAGLQLGIALDQHYSELTNIFGDNIGSLQEKGIKLQGIASLYRTNIT
EIFTTSTVDKYDIYDLLFTESIKVRVIDVDLNDYSITLQVRLPLLTRLLNTQIYKVDSISYNIQNREWYIPLPSHIMTKGAF
LGGADVKECIEAFSSYICPSDPGFVLNHEMESCLSGNISQCPRTTVTSDIVPRYAFVNGGVVANCITTTCTCNGIGNR
INQPPDQGVKIITHKECNTIGINGMLFNTNKEGTLAFYTPDDITLNNSVALNPIDISIELNKAKSDLEESKEWIRRSNQ
KLDSIEDKIEEILSKIYHIENEIARIKKLIGEAEPEA
SEQ ID NO: 28 PIV200261
MPISILLIITTMIMASHCQIDITKLQHVGVLVNSPKGCKIPQNFETRYLILSLIPKIEDSNSCGDQQIKQYKRLLDRLIIPL
YDGLRLQKDVIVTNQESNENTDPRTERFFGGVIGTIALGVATSAQITAAVALVEAKQARSDIEKLKEAIRDTNKAVQS
VQSSVGNLIVAIKSVQDYVNKEIVPSIARLGCEAAGLQLGIALTQHYSELTNIFGDNIGSLQEKGIKLQGIASLYRTNIT
EIFTTSTVDKYDIYDLLFTESIKVRVIDVDLNDYSITLQVRLPLLTRLLNCQIYKVDSISYNIQNREWYIPLPSHIMTKGAF
LGGADVKECIEAFSSYICPSDPGFVLNHEMESCLSGNISQCPRTTVTSDIVPRYAFVNGGVVANCITTTCTCNGIGNR
INQPPDQGVKIITHKECNTIGINGMLFNTNKEGTLAFYTPDDITLNNSVALNPIDISIELNKAKSDLEESKEWIRRSNQ
KLDSIEDKIEEILSKIYHIENEIARIKKLIGEAEPEA
SEQ ID NO: 29 PIV200262
MPISILLIITTMIMASHCQIDITKLQHVGVLVNSPKGCKISQNFETRYLILSLIPKIEDSNSCGDQQIKQYKRLLDRLIIPL
YDGLRLQKDVIVTNQESNENTDPRTERFFGGVIGTIALGVATSAQITAAVALVEAKQARSDIEKLKEAIRDTNKAVQS
VQSSVGPLIVAIKSVQDYVNKEIVPSIARLGCEAAGLQLGIALTQHYSELTNIFGDNIGSLQEKGIKLQGIASLYRTNITE
IFTTSTVDKYDIYDLLFTESIKVRVIDVDLNDYSITLQVRLPLLTRLLNCQIYKVDSISYNIQNREWYIPLPSHIMTKGAFL
GGADVKECIEAFSSYICPSDPGFVLNHEMESCLSGNISQCPRTTVTSDIVPRYAFVNGGVVANCITTTCTCNGIGNRI
NQPPDQGVKIITHKECNTIGINGMLFNTNKEGTLAFYTPDDITLNNSVALNPIDISIELNKAKSDLEESKEWIRRSNQK
LDSIEDKIEEILSKIYHIENEIARIKKLIGEAEPEA
SEQ ID NO: 30 PIV200263
MPISILLIITTMIMASHCQIDITKLQHVGVLVNSPKGCKISQNFETRYLILSLIPKIEDSNSCGDQQIKQYKRLLDRLIIPL
YDGLRLQKDVIVTNQESNENTDPRTERFFGGVIGTIALGVATSAQITAAVALVEAKQARSDIEKLKEAIRDTNKAVQS
VQSSVGNPIVAIKSVQDYVNKEIVPSIARLGCEAAGLQLGIALTQHYSELTNIFGDNIGSLQEKGIKLQGIASLYRTNIT
EIFTTSTVDKYDIYDLLFTESIKVRVIDVDLNDYSITLQVRLPLLTRLLNCQIYKVDSISYNIQNREWYIPLPSHIMTKGAF
LGGADVKECIEAFSSYICPSDPGFVLNHEMESCLSGNISQCPRTTVTSDIVPRYAFVNGGVVANCITTTCTCNGIGNR
INQPPDQGVKIITHKECNTIGINGMLFNTNKEGTLAFYTPDDITLNNSVALNPIDISIELNKAKSDLEESKEWIRRSNQ
KLDSIEDKIEEILSKIYHIENEIARIKKLIGEAEPEA
SEQ ID NO: 31 PIV200264
MPISILLIITTMIMASHCQIDITKLQHVGVLVNSPKGCKISQNFETRYLILSLIPKIEDSNSCGDQQIKQYKRLLDRLIIPL
YDGLRLQKDVIVTNQESNENTDPRTERFFGGVIGTIALGVATSAQITAAVALVEAKQARSDIEKLKEAIRDTNKAVQS
VQSSVGNLIVAIKSVQDYVNKEIVPSIARLGCEAAGLQLGIALTQHYSELTNIFGDNIGSLQEKGIKLQGIASLYRTNIT
EIFTTSTVDKYDIYDLLFTESIKVRVIDVDLNDYSITLQVRLPLLTRLLNCQIYKVDSISYNIQNREWYIPLPSHIMTKGAF
LGGADVKECIEAFSSYICPSDPGFVLNHEMESCLSGNISQCPRTTVTSDIVPRYAFVNGGVVANCITTTCTCNGIGNR
INQPPDQGVKIITHKECNTIGINGMLFNTNKEGTLPFYTPDDITLNNSVALNPIDISIELNKAKSDLEESKEWIRRSNQ
KLDSIEDKIEEILSKIYHIENEIARIKKLIGEAEPEA
SEQ ID NO: 32 PIV200265
MPISILLIITTMIMASHCQIDITKLQHVGVLVNSPKGCKISQNFETRYLILSLIPKIEDSNSCGDQQIKQYKRLLDRLIIPL
YDGLRLQKDVIVTNQESNENTDPRTERFFGGVIGTIALGVATSAQITAAVALVEAKQARSDIEKLKEAIRDTNKAVQS
VQSSVGNLIVAIKSVQDYVNKEIVPSIARLGCEAAGLQLGIALTQHYSELTNIFGDNIGSLQEKGIKLQGIASLYRTNIT
EIFTTSTVDKYDIYDLLFTESIKVRVIDVDLNDYSITLQVRLPLLTRLLNCQIYKVDSISYNIQNREWYIPLPSHIMTKGAF
LGGADVKECIEAPSSYICPSDPGFVLNHEMESCLSGNISQCPRTTVTSDIVPRYAFVNGGVVANCITTTCTCNGIGNR
INQPPDQGVKIITHKECNTIGINGMLFNTNKEGTLAFYTPDDITLNNSVALNPIDISIELNKAKSDLEESKEWIRRSNQ
KLDSIEDKIEEILSKIYHIENEIARIKKLIGEAEPEA
SEQ ID NO: 33 PIV200266
MPISILLIITTMIMASHCQIDITKLQHVGVLVNSPKGCKISQNFETRYLILSLIPKIEDSNSCGDQQIKQYKRLLDRLIIPL
YDGLRLQKDVIVTNQESNENTDPRTERFFGGVIGTIALGVATSAQITAAVALVEAKQARSDIEKLKEAIRDTNKAVQS
VQSSVGNLIVAIKSVQDYVNKEIVPSIARLGCEAAGLQLGIALTQHYSELTNIFGDNIGSLQEKGIKLQGIASLYRTNIT
EIFTTSTVDKYDIYDLLFTESIKVRVIDVDLNDYSITLQVRLPLLTRLLNCQIYKVDSISYNIQNREWYIPLPSHIMTKGAF
LGGADVKECIEAFSSYICPSDPGFVLNHEMESCLSGNISQCPRTLVTSDIVPRYAFVNGGVVANCITTTCTCNGIGNR
INQPPDQGVKIITHKECNTIGINGMLFNTNKEGTLAFYTPDDITLNNSVALNPIDISIELNKAKSDLEESKEWIRRSNQ
KLDSIEDKIEEILSKIYHIENEIARIKKLIGEAEPEA
SEQ ID NO: 34 PIV200267
MPISILLIITTMIMASHCQIDITKLQHVGVLVNSPKGCKISQNFETRYLILSLIPKIEDSNSCGDQQIKQYKRLLDRLIIPL
YDGLRLQKDVIVTNQESNENTDPRTERFFGGVIGTIALGVATSAQITAAVALVEAKQARSDIEKLKEAIRDTNKAVQS
VQSSPGNLIVAIKSVQDYVNKEIVPSIARLGCEAAGLQLGIALTQHYSELTNIFGDNIGSLQEKGIKLQGIASLYRTNIT
EIFTTSTVDKYDIYDLLFTESIKVRVIDVDLNDYSITLQVRLPLLTRLLNCQIYKVDSISYNIQNREWYIPLPSHIMTKGAF
LGGADVKECIEAFSSYICPSDPGFVLNHEMESCLSGNISQCPRTTVTSDIVPRYAFVNGGVVANCITTTCTCNGIGNR
INQPPDQGVKIITHKECNTIGINGMLFNTNKEGTLAFYTPDDITLNNSVALNPIDISIELNKAKSDLEESKEWIRRSNQ
KLDSIEDKIEEILSKIYHIENEIARIKKLIGEAEPEA
SEQ ID NO: 35 PIV200268
MPISILLIITTMIMASHCQIDITKLQHVGVLVNSPKGCKISQNFETRYLILSLIPKIEDSNSCGDQQIKQYKRLLDRLIIPL
YDGLRLQKDVIVTNQESNENTDPRTERFFGGVIGTIALGVATSAQITAAVALVEAKQARSDIEKLKEAIRDTNKAVQS
VQSSVGNLIVAIKSVQDYVNKEIVPSIARLGCEAAGLLLGIALTQHYSELTNIFGDNIGSLQEKGIKLQGIASLYRTNITE
IFTTSTVDKYDIYDLLFTESIKVRVIDVDLNDYSITLQVRLPLLTRLLNCQIYKVDSISYNIQNREWYIPLPSHIMTKGAFL
GGADVKECIEAFSSYICPSDPGFVLNHEMESCLSGNISQCPRTTVTSDIVPRYAFVNGGVVANCITTTCTCNGIGNRI
NQPPDQGVKIITHKECNTIGINGMLFNTNKEGTLAFYTPDDITLNNSVALNPIDISIELNKAKSDLEESKEWIRRSNQK
LDSIEDKIEEILSKIYHIENEIARIKKLIGEAEPEA
SEQ ID NO: 36 PIV200269
MPISILLIITTMIMASHCQIDITKLQHVGVLVNSPKGCKISQNFETRYLILSLIPKIEDSNSCGDQQIKQYKRLLDRLIIPL
YDGLRLQKDVIVTNQESNENTDPRTERFFGGVIGTIALGVATSAQITAAVALVEAKQARSDIEKLKEAIRDTNKAVQS
VQSSVGNLIVAIKSVQDYVNKEIVPSIARLGCEAAGLQLGIALDQHYSELTNIFGDNIGSLQEKGIKLQGIASLYRTNIT
EIFTTSTVDKYDIYDLLFTESIKVRVIDVDLNDYSITLQVRLPLLTRLLNCQIYKVDSISYNIQNREWYIPLPSHIMTKGAF
LGGADVKECIEAFSSYICPSDPGFVLNHEMESCLSGNISQCPRTTVTSDIVPRYAFVNGGVVANCITTTCTCNGIGNR
INQPPDQGVKIITHKECNTIGINGMLFNTNKEGTLAFYTPDDITLNNSVALNPIDISIELNKAKSDLEESKEWIRRSNQ
KLDSIEDKIEEILSKIYHIENEIARIKKLIGEAEPEA
SEQ ID NO:37 PIV200270
MPISILLIITTMIMASHCQIDITKLQHVGVLVNSPKGMKIPQNFETRYLILSLIPKIEDSNSCGDQQIKQYKRLLDRLIIPL
YDCLRLQKDVIVTNQESNENTDPRTERFFGGVIGTIALGVATSAQITAAVALVEAKQARSDIEKLKEAIRDTNKAVQS
VQSSVGNLIVAIKSVQDYVNKEIVPSIARLGCEAAGLQLGIALTQHYSELTNIFGDNIGSCQEKGIKLQGIASLYRTNIT
EIFTTSTVDKYDIYDLLFTESIKVRVIDVDLNDYSITLQVRLPLLTRLLNTQIYKVDSISYNIQNREWYIPLPSHIMTKGAF
LGGADVKECIEAFSSYICPSDPGFVLNHEMESCLSGNISQCPRTTVTSDIVPRYAFVNGGVVANCITITCTCNGIGNR
INQPPDQGVKIITHKECNTIGINGMLFNTNKEGTLAFYTPDDITLNNSVALNPIDISIELNKAKSDLEESKEWIRRSNQ
KLDSIEDKIEEILSKIYHIENEIARIKKLIGEAEPEA
SEQ ID NO: 38 PIV200271
MPISILLIITTMIMASHCQIDITKLQHVGVLVNSPKGCKISQNFETRYLILSLIPKIEDSNSCGDQQIKQYKRLLDRLIIPL
YDCLRLQKDVIVTNQESNENTDPRTERFFGGVIGTIALGVATSAQITAAVALVEAKQARSDIEKLKEAIRDTNKAVQS
VQSSVGNLIVAIKSVQDYVNKEIVPSIARLGCEAAGLQLGIALTQHYSELTNIFGDNIGSCQEKGIKLQGIASLYRTNIT
EIFTTSTVDKYDIYDLLFTESIKVRVIDVDLNDYSITLQVRLPLLTRLLNCQIYKVDSISYNIQNREWYIPLPSHIMTKGAF
LGGADVKECIEAFSSYICPSDPGFVLNHEMESCLSGNISQCPRTTVTSDIVPRYAFVNGGVVANCITTTCTCNGIGNR
INQPPDQGVKIITHKECNTIGINGMLFNTNKEGTLAFYTPDDITLNNSVALNPIDISIELNKAKSDLEESKEWIRRSNQ
KLDSIEDKIEEILSKIYHIENEIARIKKLIGEAEPEA
SEQ ID NO: 39 PIV200272
MPISILLIITTMIMASHCQIDITKLQHVGVLVNSPKGMKISQNFETRYLILSLIPKIEDSNSCGDQQIKQYKRLLDRLIIPL
YDCLRLQKDVIVTNQESNENTDPRTERFFGGVIGTIALGVATSAQITAAVALVEAKQARSDIEKLKEAIRDTNKAVQS
VQSSVGPLIVAIKSVQDYVNKEIVPSIARLGCEAAGLQLGIALTQHYSELTNIFGDNIGSCQEKGIKLQGIASLYRTNIT
EIFTTSTVDKYDIYDLLFTESIKVRVIDVDLNDYSITLQVRLPLLTRLLNTQIYKVDSISYNIQNREWYIPLPSHIMTKGAF
LGGADVKECIEAFSSYICPSDPGFVLNHEMESCLSGNISQCPRTTVTSDIVPRYAFVNGGVVANCITTTCTCNGIGNR
INQPPDQGVKIITHKECNTIGINGMLFNTNKEGTLAFYTPDDITLNNSVALNPIDISIELNKAKSDLEESKEWIRRSNQ
KLDSIEDKIEEILSKIYHIENEIARIKKLIGEAEPEA
SEQ ID NO: 40 PIV200273
MPISILLIITTMIMASHCQIDITKLQHVGVLVNSPKGMKISQNFETRYLILSLIPKIEDSNSCGDQQIKQYKRLLDRLIIPL
YDCLRLQKDVIVTNQESNENTDPRTERFFGGVIGTIALGVATSAQITAAVALVEAKQARSDIEKLKEAIRDTNKAVQS
VQSSVGNPIVAIKSVQDYVNKEIVPSIARLGCEAAGLQLGIALTQHYSELTNIFGDNIGSCQEKGIKLQGIASLYRTNIT
EIFTTSTVDKYDIYDLLFTESIKVRVIDVDLNDYSITLQVRLPLLTRLLNTQIYKVDSISYNIQNREWYIPLPSHIMTKGAF
LGGADVKECIEAFSSYICPSDPGFVLNHEMESCLSGNISQCPRTTVTSDIVPRYAFVNGGVVANCITTTCTCNGIGNR
INQPPDQGVKIITHKECNTIGINGMLFNTNKEGTLAFYTPDDITLNNSVALNPIDISIELNKAKSDLEESKEWIRRSNQ
KLDSIEDKIEEILSKIYHIENEIARIKKLIGEAEPEA
SEQ ID NO: 41 PIV200274
MPISILLIITTMIMASHCQIDITKLQHVGVLVNSPKGMKISQNFETRYLILSLIPKIEDSNSCGDQQIKQYKRLLDRLIIPL
YDCLRLQKDVIVTNQESNENTDPRTERFFGGVIGTIALGVATSAQITAAVALVEAKQARSDIEKLKEAIRDTNKAVQS
VQSSVGNLIVAIKSVQDYVNKEIVPSIARLGCEAAGLQLGIALTQHYSELTNIFGDNIGSCQEKGIKLQGIASLYRTNIT
EIFTTSTVDKYDIYDLLFTESIKVRVIDVDLNDYSITLQVRLPLLTRLLNTQIYKVDSISYNIQNREWYIPLPSHIMTKGAF
LGGADVKECIEAFSSYICPSDPGFVLNHEMESCLSGNISQCPRTTVTSDIVPRYAFVNGGVVANCITTTCTCNGIGNR
INQPPDQGVKIITHKECNTIGINGMLFNTNKEGTLPFYTPDDITLNNSVALNPIDISIELNKAKSDLEESKEWIRRSNQ
KLDSIEDKIEEILSKIYHIENEIARIKKLIGEAEPEA
SEQ ID NO: 42 PIV200275
MPISILLIITTMIMASHCQIDITKLQHVGVLVNSPKGMKISQNFETRYLILSLIPKIEDSNSCGDQQIKQYKRLLDRLIIPL
YDCLRLQKDVIVTNQESNENTDPRTERFFGGVIGTIALGVATSAQITAAVALVEAKQARSDIEKLKEAIRDTNKAVQS
VQSSVGNLIVAIKSVQDYVNKEIVPSIARLGCEAAGLQLGIALTQHYSELTNIFGDNIGSCQEKGIKLQGIASLYRTNIT
EIFTTSTVDKYDIYDLLFTESIKVRVIDVDLNDYSITLQVRLPLLTRLLNTQIYKVDSISYNIQNREWYIPLPSHIMTKGAF
LGGADVKECIEAPSSYICPSDPGFVLNHEMESCLSGNISQCPRTTVTSDIVPRYAFVNGGVVANCITTTCTCNGIGNR
INQPPDQGVKIITHKECNTIGINGMLFNTNKEGTLAFYTPDDITLNNSVALNPIDISIELNKAKSDLEESKEWIRRSNQ
KLDSIEDKIEEILSKIYHIENEIARIKKLIGEAEPEA
SEQ ID NO: 43 PIV200276
MPISILLIITTMIMASHCQIDITKLQHVGVLVNSPKGMKISQNFETRYLILSLIPKIEDSNSCGDQQIKQYKRLLDRLIIPL
YDCLRLQKDVIVTNQESNENTDPRTERFFGGVIGTIALGVATSAQITAAVALVEAKQARSDIEKLKEAIRDTNKAVQS
VQSSVGNLIVAIKSVQDYVNKEIVPSIARLGCEAAGLQLGIALTQHYSELTNIFGDNIGSCQEKGIKLQGIASLYRTNIT
EIFTTSTVDKYDIYDLLFTESIKVRVIDVDLNDYSITLQVRLPLLTRLLNTQIYKVDSISYNIQNREWYIPLPSHIMTKGAF
LGGADVKECIEAFSSYICPSDPGFVLNHEMESCLSGNISQCPRTLVTSDIVPRYAFVNGGVVANCITTTCTCNGIGNR
INQPPDQGVKIITHKECNTIGINGMLFNTNKEGTLAFYTPDDITLNNSVALNPIDISIELNKAKSDLEESKEWIRRSNQ
KLDSIEDKIEEILSKIYHIENEIARIKKLIGEAEPEA
SEQ ID NO: 44 PIV200277
MPISILLIITTMIMASHCQIDITKLQHVGVLVNSPKGMKISQNFETRYLILSLIPKIEDSNSCGDQQIKQYKRLLDRLIIPL
YDCLRLQKDVIVTNQESNENTDPRTERFFGGVIGTIALGVATSAQITAAVALVEAKQARSDIEKLKEAIRDTNKAVQS
VQSSPGNLIVAIKSVQDYVNKEIVPSIARLGCEAAGLQLGIALTQHYSELTNIFGDNIGSCQEKGIKLQGIASLYRTNIT
EIFTTSTVDKYDIYDLLFTESIKVRVIDVDLNDYSITLQVRLPLLTRLLNTQIYKVDSISYNIQNREWYIPLPSHIMTKGAF
LGGADVKECIEAFSSYICPSDPGFVLNHEMESCLSGNISQCPRTTVTSDIVPRYAFVNGGVVANCITTTCTCNGIGNR
INQPPDQGVKIITHKECNTIGINGMLFNTNKEGTLAFYTPDDITLNNSVALNPIDISIELNKAKSDLEESKEWIRRSNQ
KLDSIEDKIEEILSKIYHIENEIARIKKLIGEAEPEA
SEQ ID NO: 45 PIV200278
MPISILLIITTMIMASHCQIDITKLQHVGVLVNSPKGMKISQNFETRYLILSLIPKIEDSNSCGDQQIKQYKRLLDRLIIPL
YDCLRLQKDVIVTNQESNENTDPRTERFFGGVIGTIALGVATSAQITAAVALVEAKQARSDIEKLKEAIRDTNKAVQS
VQSSVGNLIVAIKSVQDYVNKEIVPSIARLGCEAAGLLLGIALTQHYSELTNIFGDNIGSCQEKGIKLQGIASLYRTNITE
IFTTSTVDKYDIYDLLFTESIKVRVIDVDLNDYSITLQVRLPLLTRLLNTQIYKVDSISYNIQNREWYIPLPSHIMTKGAFL
GGADVKECIEAFSSYICPSDPGFVLNHEMESCLSGNISQCPRTTVTSDIVPRYAFVNGGVVANCITTTCTCNGIGNRI
NQPPDQGVKIITHKECNTIGINGMLFNTNKEGTLAFYTPDDITLNNSVALNPIDISIELNKAKSDLEESKEWIRRSNQK
LDSIEDKIEEILSKIYHIENEIARIKKLIGEAEPEA
SEQ ID NO: 46 PIV200279
MPISILLIITTMIMASHCQIDITKLQHVGVLVNSPKGMKISQNFETRYLILSLIPKIEDSNSCGDQQIKQYKRLLDRLIIPL
YDCLRLQKDVIVTNQESNENTDPRTERFFGGVIGTIALGVATSAQITAAVALVEAKQARSDIEKLKEAIRDTNKAVQS
VQSSVGNLIVAIKSVQDYVNKEIVPSIARLGCEAAGLQLGIALDQHYSELTNIFGDNIGSCQEKGIKLQGIASLYRTNIT
EIFTTSTVDKYDIYDLLFTESIKVRVIDVDLNDYSITLQVRLPLLTRLLNTQIYKVDSISYNIQNREWYIPLPSHIMTKGAF
LGGADVKECIEAFSSYICPSDPGFVLNHEMESCLSGNISQCPRTTVTSDIVPRYAFVNGGVVANCITTTCTCNGIGNR
INQPPDQGVKIITHKECNTIGINGMLFNTNKEGTLAFYTPDDITLNNSVALNPIDISIELNKAKSDLEESKEWIRRSNQ
KLDSIEDKIEEILSKIYHIENEIARIKKLIGEAEPEA
SEQ ID NO: 47 PIV200280
MPISILLIITTMIMASHCQIDITKLQHVGVLVNSPKGMKISQNFETRYLILSLIPKIEDSNSCGDQQIKQYKRLLDRLIIPL
YDGLRLQKDVIVTNQESNENTDPRTERFFGGVIGTIALGVATSAQITAAVALVEAKQARSDIEKLKEAIRDTNKAVQS
VQSSVGPPIVAIKSVQDYVNKEIVPSIARLGCEAAGLQLGIALTQHYSELTNIFGDNIGSLQEKGIKLQGIASLYRTNIT
EIFTTSTVDKYDIYDLLFTESIKVRVIDVDLNDYSITLQVRLPLLTRLLNTQIYKVDSISYNIQNREWYIPLPSHIMTKGAF
LGGADVKECIEAFSSYICPSDPGFVLNHEMESCLSGNISQCPRTTVTSDIVPRYAFVNGGVVANCITTTCTCNGIGNR
INQPPDQGVKIITHKECNTIGINGMLFNTNKEGTLAFYTPDDITLNNSVALNPIDISIELNKAKSDLEESKEWIRRSNQ
KLDSIEDKIEEILSKIYHIENEIARIKKLIGEAEPEA
SEQ ID NO: 48 PIV200281
MPISILLIITTMIMASHCQIDITKLQHVGVLVNSPKGMKISQNFETRYLILSLIPKIEDSNSCGDQQIKQYKRLLDRLIIPL
YDGLRLQKDVIVTNQESNENTDPRTERFFGGVIGTIALGVATSAQITAAVALVEAKQARSDIEKLKEAIRDTNKAVQS
VQSSVGPLIVAIKSVQDYVNKEIVPSIARLGCEAAGLQLGIALTQHYSELTNIFGDNIGSLQEKGIKLQGIASLYRTNITE
IFTTSTVDKYDIYDLLFTESIKVRVIDVDLNDYSITLQVRLPLLTRLLNTQIYKVDSISYNIQNREWYIPLPSHIMTKGAFL
GGADVKECIEAFSSYICPSDPGFVLNHEMESCLSGNISQCPRTTVTSDIVPRYAFVNGGVVANCITTTCTCNGIGNRI
NQPPDQGVKIITHKECNTIGINGMLFNTNKEGTLPFYTPDDITLNNSVALNPIDISIELNKAKSDLEESKEWIRRSNQK
LDSIEDKIEEILSKIYHIENEIARIKKLIGEAEPEA
SEQ ID NO: 49 PIV200282
MPISILLIITTMIMASHCQIDITKLQHVGVLVNSPKGMKISQNFETRYLILSLIPKIEDSNSCGDQQIKQYKRLLDRLIIPL
YDGLRLQKDVIVTNQESNENTDPRTERFFGGVIGTIALGVATSAQITAAVALVEAKQARSDIEKLKEAIRDTNKAVQS
VQSSVGPLIVAIKSVQDYVNKEIVPSIARLGCEAAGLQLGIALTQHYSELTNIFGDNIGSLQEKGIKLQGIASLYRTNITE
IFTTSTVDKYDIYDLLFTESIKVRVIDVDLNDYSITLQVRLPLLTRLLNTQIYKVDSISYNIQNREWYIPLPSHIMTKGAFL
GGADVKECIEAPSSYICPSDPGFVLNHEMESCLSGNISQCPRTTVTSDIVPRYAFVNGGVVANCITTTCTCNGIGNRI
NQPPDQGVKIITHKECNTIGINGMLFNTNKEGTLAFYTPDDITLNNSVALNPIDISIELNKAKSDLEESKEWIRRSNQK
LDSIEDKIEEILSKIYHIENEIARIKKLIGEAEPEA
SEQ ID NO: 50 PIV200283
MPISILLIITTMIMASHCQIDITKLQHVGVLVNSPKGMKISQNFETRYLILSLIPKIEDSNSCGDQQIKQYKRLLDRLIIPL
YDGLRLQKDVIVTNQESNENTDPRTERFFGGVIGTIALGVATSAQITAAVALVEAKQARSDIEKLKEAIRDTNKAVQS
VQSSVGPLIVAIKSVQDYVNKEIVPSIARLGCEAAGLQLGIALTQHYSELTNIFGDNIGSLQEKGIKLQGIASLYRTNITE
IFTTSTVDKYDIYDLLFTESIKVRVIDVDLNDYSITLQVRLPLLTRLLNTQIYKVDSISYNIQNREWYIPLPSHIMTKGAFL
GGADVKECIEAFSSYICPSDPGFVLNHEMESCLSGNISQCPRTLVTSDIVPRYAFVNGGVVANCITTTCTCNGIGNRI
NQPPDQGVKIITHKECNTIGINGMLFNTNKEGTLAFYTPDDITLNNSVALNPIDISIELNKAKSDLEESKEWIRRSNQK
LDSIEDKIEEILSKIYHIENEIARIKKLIGEAEPEA
SEQ ID NO: 51 PIV200284
MPISILLIITTMIMASHCQIDITKLQHVGVLVNSPKGMKISQNFETRYLILSLIPKIEDSNSCGDQQIKQYKRLLDRLIIPL
YDGLRLQKDVIVTNQESNENTDPRTERFFGGVIGTIALGVATSAQITAAVALVEAKQARSDIEKLKEAIRDTNKAVQS
VQSSPGPLIVAIKSVQDYVNKEIVPSIARLGCEAAGLQLGIALTQHYSELTNIFGDNIGSLQEKGIKLQGIASLYRTNITE
IFTTSTVDKYDIYDLLFTESIKVRVIDVDLNDYSITLQVRLPLLTRLLNTQIYKVDSISYNIQNREWYIPLPSHIMTKGAFL
GGADVKECIEAFSSYICPSDPGFVLNHEMESCLSGNISQCPRTTVTSDIVPRYAFVNGGVVANCITTTCTCNGIGNRI
NQPPDQGVKIITHKECNTIGINGMLFNTNKEGTLAFYTPDDITLNNSVALNPIDISIELNKAKSDLEESKEWIRRSNQK
LDSIEDKIEEILSKIYHIENEIARIKKLIGEAEPEA
SEQ ID NO: 52 PIV200285
MPISILLIITTMIMASHCQIDITKLQHVGVLVNSPKGMKISQNFETRYLILSLIPKIEDSNSCGDQQIKQYKRLLDRLIIPL
YDGLRLQKDVIVTNQESNENTDPRTERFFGGVIGTIALGVATSAQITAAVALVEAKQARSDIEKLKEAIRDTNKAVQS
VQSSVGPLIVAIKSVQDYVNKEIVPSIARLGCEAAGLLLGIALTQHYSELTNIFGDNIGSLQEKGIKLQGIASLYRTNITEI
FTTSTVDKYDIYDLLFTESIKVRVIDVDLNDYSITLQVRLPLLTRLLNTQIYKVDSISYNIQNREWYIPLPSHIMTKGAFL
GGADVKECIEAFSSYICPSDPGFVLNHEMESCLSGNISQCPRTTVTSDIVPRYAFVNGGVVANCITTTCTCNGIGNRI
NQPPDQGVKIITHKECNTIGINGMLFNTNKEGTLAFYTPDDITLNNSVALNPIDISIELNKAKSDLEESKEWIRRSNQK
LDSIEDKIEEILSKIYHIENEIARIKKLIGEAEPEA
SEQ ID NO: 53 PIV200286
MPISILLIITTMIMASHCQIDITKLQHVGVLVNSPKGMKISQNFETRYLILSLIPKIEDSNSCGDQQIKQYKRLLDRLIIPL
YDGLRLQKDVIVTNQESNENTDPRTERFFGGVIGTIALGVATSAQITAAVALVEAKQARSDIEKLKEAIRDTNKAVQS
VQSSVGPLIVAIKSVQDYVNKEIVPSIARLGCEAAGLQLGIALDQHYSELTNIFGDNIGSLQEKGIKLQGIASLYRTNIT
EIFTTSTVDKYDIYDLLFTESIKVRVIDVDLNDYSITLQVRLPLLTRLLNTQIYKVDSISYNIQNREWYIPLPSHIMTKGAF
LGGADVKECIEAFSSYICPSDPGFVLNHEMESCLSGNISQCPRTTVTSDIVPRYAFVNGGVVANCITTTCTCNGIGNR
INQPPDQGVKIITHKECNTIGINGMLFNTNKEGTLAFYTPDDITLNNSVALNPIDISIELNKAKSDLEESKEWIRRSNQ
KLDSIEDKIEEILSKIYHIENEIARIKKLIGEAEPEA
SEQ ID NO: 54 PIV200287
MPISILLIITTMIMASHCQIDITKLQHVGVLVNSPKGMKISQNFETRYLILSLIPKIEDSNSCGDQQIKQYKRLLDRLIIPL
YDGLRLQKDVIVTNQESNENTDPRTERFFGGVIGTIALGVATSAQITAAVALVEAKQARSDIEKLKEAIRDTNKAVQS
VQSSVGNPIVAIKSVQDYVNKEIVPSIARLGCEAAGLQLGIALTQHYSELTNIFGDNIGSLQEKGIKLQGIASLYRTNIT
EIFTTSTVDKYDIYDLLFTESIKVRVIDVDLNDYSITLQVRLPLLTRLLNTQIYKVDSISYNIQNREWYIPLPSHIMTKGAF
LGGADVKECIEAFSSYICPSDPGFVLNHEMESCLSGNISQCPRTTVTSDIVPRYAFVNGGVVANCITTTCTCNGIGNR
INQPPDQGVKIITHKECNTIGINGMLFNTNKEGTLPFYTPDDITLNNSVALNPIDISIELNKAKSDLEESKEWIRRSNQ
KLDSIEDKIEEILSKIYHIENEIARIKKLIGEAEPEA
SEQ ID NO: 55 PIV200288
MPISILLIITTMIMASHCQIDITKLQHVGVLVNSPKGMKISQNFETRYLILSLIPKIEDSNSCGDQQIKQYKRLLDRLIIPL
YDGLRLQKDVIVTNQESNENTDPRTERFFGGVIGTIALGVATSAQITAAVALVEAKQARSDIEKLKEAIRDTNKAVQS
VQSSVGNPIVAIKSVQDYVNKEIVPSIARLGCEAAGLQLGIALTQHYSELTNIFGDNIGSLQEKGIKLQGIASLYRTNIT
EIFTTSTVDKYDIYDLLFTESIKVRVIDVDLNDYSITLQVRLPLLTRLLNTQIYKVDSISYNIQNREWYIPLPSHIMTKGAF
LGGADVKECIEAPSSYICPSDPGFVLNHEMESCLSGNISQCPRTTVTSDIVPRYAFVNGGVVANCITTTCTCNGIGNR
INQPPDQGVKIITHKECNTIGINGMLFNTNKEGTLAFYTPDDITLNNSVALNPIDISIELNKAKSDLEESKEWIRRSNQ
KLDSIEDKIEEILSKIYHIENEIARIKKLIGEAEPEA
SEQ ID NO: 56 PIV200289
MPISILLIITTMIMASHCQIDITKLQHVGVLVNSPKGMKISQNFETRYLILSLIPKIEDSNSCGDQQIKQYKRLLDRLIIPL
YDGLRLQKDVIVTNQESNENTDPRTERFFGGVIGTIALGVATSAQITAAVALVEAKQARSDIEKLKEAIRDTNKAVQS
VQSSVGNPIVAIKSVQDYVNKEIVPSIARLGCEAAGLQLGIALTQHYSELTNIFGDNIGSLQEKGIKLQGIASLYRTNIT
EIFTTSTVDKYDIYDLLFTESIKVRVIDVDLNDYSITLQVRLPLLTRLLNTQIYKVDSISYNIQNREWYIPLPSHIMTKGAF
LGGADVKECIEAFSSYICPSDPGFVLNHEMESCLSGNISQCPRTLVTSDIVPRYAFVNGGVVANCITTTCTCNGIGNR
INQPPDQGVKIITHKECNTIGINGMLFNTNKEGTLAFYTPDDITLNNSVALNPIDISIELNKAKSDLEESKEWIRRSNQ
KLDSIEDKIEEILSKIYHIENEIARIKKLIGEAEPEA
SEQ ID NO: 57 PIV200290
MPISILLIITTMIMASHCQIDITKLQHVGVLVNSPKGMKISQNFETRYLILSLIPKIEDSNSCGDQQIKQYKRLLDRLIIPL
YDGLRLQKDVIVTNQESNENTDPRTERFFGGVIGTIALGVATSAQITAAVALVEAKQARSDIEKLKEAIRDTNKAVQS
VQSSPGNPIVAIKSVQDYVNKEIVPSIARLGCEAAGLQLGIALTQHYSELTNIFGDNIGSLQEKGIKLQGIASLYRTNIT
EIFTTSTVDKYDIYDLLFTESIKVRVIDVDLNDYSITLQVRLPLLTRLLNTQIYKVDSISYNIQNREWYIPLPSHIMTKGAF
LGGADVKECIEAFSSYICPSDPGFVLNHEMESCLSGNISQCPRTTVTSDIVPRYAFVNGGVVANCITTTCTCNGIGNR
INQPPDQGVKIITHKECNTIGINGMLFNTNKEGTLAFYTPDDITLNNSVALNPIDISIELNKAKSDLEESKEWIRRSNQ
KLDSIEDKIEEILSKIYHIENEIARIKKLIGEAEPEA
SEQ ID NO: 58 PIV200291
MPISILLIITTMIMASHCQIDITKLQHVGVLVNSPKGMKISQNFETRYLILSLIPKIEDSNSCGDQQIKQYKRLLDRLIIPL
YDGLRLQKDVIVTNQESNENTDPRTERFFGGVIGTIALGVATSAQITAAVALVEAKQARSDIEKLKEAIRDTNKAVQS
VQSSVGNPIVAIKSVQDYVNKEIVPSIARLGCEAAGLLLGIALTQHYSELTNIFGDNIGSLQEKGIKLQGIASLYRTNITE
IFTTSTVDKYDIYDLLFTESIKVRVIDVDLNDYSITLQVRLPLLTRLLNTQIYKVDSISYNIQNREWYIPLPSHIMTKGAFL
GGADVKECIEAFSSYICPSDPGFVLNHEMESCLSGNISQCPRTTVTSDIVPRYAFVNGGVVANCITTTCTCNGIGNRI
NQPPDQGVKIITHKECNTIGINGMLFNTNKEGTLAFYTPDDITLNNSVALNPIDISIELNKAKSDLEESKEWIRRSNQK
LDSIEDKIEEILSKIYHIENEIARIKKLIGEAEPEA
SEQ ID NO: 59 PIV200292
MPISILLIITTMIMASHCQIDITKLQHVGVLVNSPKGMKISQNFETRYLILSLIPKIEDSNSCGDQQIKQYKRLLDRLIIPL
YDGLRLQKDVIVTNQESNENTDPRTERFFGGVIGTIALGVATSAQITAAVALVEAKQARSDIEKLKEAIRDTNKAVQS
VQSSVGNPIVAIKSVQDYVNKEIVPSIARLGCEAAGLQLGIALDQHYSELTNIFGDNIGSLQEKGIKLQGIASLYRTNIT
EIFTTSTVDKYDIYDLLFTESIKVRVIDVDLNDYSITLQVRLPLLTRLLNTQIYKVDSISYNIQNREWYIPLPSHIMTKGAF
LGGADVKECIEAFSSYICPSDPGFVLNHEMESCLSGNISQCPRTTVTSDIVPRYAFVNGGVVANCITTTCTCNGIGNR
INQPPDQGVKIITHKECNTIGINGMLFNTNKEGTLAFYTPDDITLNNSVALNPIDISIELNKAKSDLEESKEWIRRSNQ
KLDSIEDKIEEILSKIYHIENEIARIKKLIGEAEPEA
SEQ ID NO: 60 PIV200293
MPISILLIITTMIMASHCQIDITKLQHVGVLVNSPKGMKISQNFETRYLILSLIPKIEDSNSCGDQQIKQYKRLLDRLIIPL
YDGLRLQKDVIVTNQESNENTDPRTERFFGGVIGTIALGVATSAQITAAVALVEAKQARSDIEKLKEAIRDTNKAVQS
VQSSVGNLIVAIKSVQDYVNKEIVPSIARLGCEAAGLQLGIALTQHYSELTNIFGDNIGSLQEKGIKLQGIASLYRTNIT
EIFTTSTVDKYDIYDLLFTESIKVRVIDVDLNDYSITLQVRLPLLTRLLNTQIYKVDSISYNIQNREWYIPLPSHIMTKGAF
LGGADVKECIEAPSSYICPSDPGFVLNHEMESCLSGNISQCPRTTVTSDIVPRYAFVNGGVVANCITTTCTCNGIGNR
INQPPDQGVKIITHKECNTIGINGMLFNTNKEGTLPFYTPDDITLNNSVALNPIDISIELNKAKSDLEESKEWIRRSNQ
KLDSIEDKIEEILSKIYHIENEIARIKKLIGEAEPEA
SEQ ID NO: 61 PIV200294
MPISILLIITTMIMASHCQIDITKLQHVGVLVNSPKGMKISQNFETRYLILSLIPKIEDSNSCGDQQIKQYKRLLDRLIIPL
YDGLRLQKDVIVTNQESNENTDPRTERFFGGVIGTIALGVATSAQITAAVALVEAKQARSDIEKLKEAIRDTNKAVQS
VQSSVGNLIVAIKSVQDYVNKEIVPSIARLGCEAAGLQLGIALTQHYSELTNIFGDNIGSLQEKGIKLQGIASLYRTNIT
EIFTTSTVDKYDIYDLLFTESIKVRVIDVDLNDYSITLQVRLPLLTRLLNTQIYKVDSISYNIQNREWYIPLPSHIMTKGAF
LGGADVKECIEAFSSYICPSDPGFVLNHEMESCLSGNISQCPRTLVTSDIVPRYAFVNGGVVANCITTTCTCNGIGNR
INQPPDQGVKIITHKECNTIGINGMLFNTNKEGTLPFYTPDDITLNNSVALNPIDISIELNKAKSDLEESKEWIRRSNQ
KLDSIEDKIEEILSKIYHIENEIARIKKLIGEAEPEA
SEQ ID NO: 62 PIV200295
MPISILLIITTMIMASHCQIDITKLQHVGVLVNSPKGMKISQNFETRYLILSLIPKIEDSNSCGDQQIKQYKRLLDRLIIPL
YDGLRLQKDVIVTNQESNENTDPRTERFFGGVIGTIALGVATSAQITAAVALVEAKQARSDIEKLKEAIRDTNKAVQS
VQSSPGNLIVAIKSVQDYVNKEIVPSIARLGCEAAGLQLGIALTQHYSELTNIFGDNIGSLQEKGIKLQGIASLYRTNIT
EIFTTSTVDKYDIYDLLFTESIKVRVIDVDLNDYSITLQVRLPLLTRLLNTQIYKVDSISYNIQNREWYIPLPSHIMTKGAF
LGGADVKECIEAFSSYICPSDPGFVLNHEMESCLSGNISQCPRTTVTSDIVPRYAFVNGGVVANCITTTCTCNGIGNR
INQPPDQGVKIITHKECNTIGINGMLFNTNKEGTLPFYTPDDITLNNSVALNPIDISIELNKAKSDLEESKEWIRRSNQ
KLDSIEDKIEEILSKIYHIENEIARIKKLIGEAEPEA
SEQ ID NO: 63 PIV200296
MPISILLIITTMIMASHCQIDITKLQHVGVLVNSPKGMKISQNFETRYLILSLIPKIEDSNSCGDQQIKQYKRLLDRLIIPL
YDGLRLQKDVIVTNQESNENTDPRTERFFGGVIGTIALGVATSAQITAAVALVEAKQARSDIEKLKEAIRDTNKAVQS
VQSSVGNLIVAIKSVQDYVNKEIVPSIARLGCEAAGLLLGIALTQHYSELTNIFGDNIGSLQEKGIKLQGIASLYRTNITE
IFTTSTVDKYDIYDLLFTESIKVRVIDVDLNDYSITLQVRLPLLTRLLNTQIYKVDSISYNIQNREWYIPLPSHIMTKGAFL
GGADVKECIEAFSSYICPSDPGFVLNHEMESCLSGNISQCPRTTVTSDIVPRYAFVNGGVVANCITTTCTCNGIGNRI
NQPPDQGVKIITHKECNTIGINGMLFNTNKEGTLPFYTPDDITLNNSVALNPIDISIELNKAKSDLEESKEWIRRSNQK
LDSIEDKIEEILSKIYHIENEIARIKKLIGEAEPEA
SEQ ID NO: 64 PIV200297
MPISILLIITTMIMASHCQIDITKLQHVGVLVNSPKGMKISQNFETRYLILSLIPKIEDSNSCGDQQIKQYKRLLDRLIIPL
YDGLRLQKDVIVTNQESNENTDPRTERFFGGVIGTIALGVATSAQITAAVALVEAKQARSDIEKLKEAIRDTNKAVQS
VQSSVGNLIVAIKSVQDYVNKEIVPSIARLGCEAAGLQLGIALDQHYSELTNIFGDNIGSLQEKGIKLQGIASLYRTNIT
EIFTTSTVDKYDIYDLLFTESIKVRVIDVDLNDYSITLQVRLPLLTRLLNTQIYKVDSISYNIQNREWYIPLPSHIMTKGAF
LGGADVKECIEAFSSYICPSDPGFVLNHEMESCLSGNISQCPRTTVTSDIVPRYAFVNGGVVANCITTTCTCNGIGNR
INQPPDQGVKIITHKECNTIGINGMLFNTNKEGTLPFYTPDDITLNNSVALNPIDISIELNKAKSDLEESKEWIRRSNQ
KLDSIEDKIEEILSKIYHIENEIARIKKLIGEAEPEA
SEQ ID NO: 65 PIV200298
MPISILLIITTMIMASHCQIDITKLQHVGVLVNSPKGMKISQNFETRYLILSLIPKIEDSNSCGDQQIKQYKRLLDRLIIPL
YDGLRLQKDVIVTNQESNENTDPRTERFFGGVIGTIALGVATSAQITAAVALVEAKQARSDIEKLKEAIRDTNKAVQS
VQSSVGNLIVAIKSVQDYVNKEIVPSIARLGCEAAGLQLGIALTQHYSELTNIFGDNIGSLQEKGIKLQGIASLYRTNIT
EIFTTSTVDKYDIYDLLFTESIKVRVIDVDLNDYSITLQVRLPLLTRLLNTQIYKVDSISYNIQNREWYIPLPSHIMTKGAF
LGGADVKECIEAPSSYICPSDPGFVLNHEMESCLSGNISQCPRTLVTSDIVPRYAFVNGGVVANCITTTCTCNGIGNR
INQPPDQGVKIITHKECNTIGINGMLFNTNKEGTLAFYTPDDITLNNSVALNPIDISIELNKAKSDLEESKEWIRRSNQ
KLDSIEDKIEEILSKIYHIENEIARIKKLIGEAEPEA
SEQ ID NO: 66 PIV200299
MPISILLIITTMIMASHCQIDITKLQHVGVLVNSPKGMKISQNFETRYLILSLIPKIEDSNSCGDQQIKQYKRLLDRLIIPL
YDGLRLQKDVIVTNQESNENTDPRTERFFGGVIGTIALGVATSAQITAAVALVEAKQARSDIEKLKEAIRDTNKAVQS
VQSSPGNLIVAIKSVQDYVNKEIVPSIARLGCEAAGLQLGIALTQHYSELTNIFGDNIGSLQEKGIKLQGIASLYRTNIT
EIFTTSTVDKYDIYDLLFTESIKVRVIDVDLNDYSITLQVRLPLLTRLLNTQIYKVDSISYNIQNREWYIPLPSHIMTKGAF
LGGADVKECIEAPSSYICPSDPGFVLNHEMESCLSGNISQCPRTTVTSDIVPRYAFVNGGVVANCITTTCTCNGIGNR
INQPPDQGVKIITHKECNTIGINGMLFNTNKEGTLAFYTPDDITLNNSVALNPIDISIELNKAKSDLEESKEWIRRSNQ
KLDSIEDKIEEILSKIYHIENEIARIKKLIGEAEPEA
SEQ ID NO: 67 PIV200300
MPISILLIITTMIMASHCQIDITKLQHVGVLVNSPKGMKISQNFETRYLILSLIPKIEDSNSCGDQQIKQYKRLLDRLIIPL
YDGLRLQKDVIVTNQESNENTDPRTERFFGGVIGTIALGVATSAQITAAVALVEAKQARSDIEKLKEAIRDTNKAVQS
VQSSVGNLIVAIKSVQDYVNKEIVPSIARLGCEAAGLLLGIALTQHYSELTNIFGDNIGSLQEKGIKLQGIASLYRTNITE
IFTTSTVDKYDIYDLLFTESIKVRVIDVDLNDYSITLQVRLPLLTRLLNTQIYKVDSISYNIQNREWYIPLPSHIMTKGAFL
GGADVKECIEAPSSYICPSDPGFVLNHEMESCLSGNISQCPRTTVTSDIVPRYAFVNGGVVANCITTTCTCNGIGNRI
NQPPDQGVKIITHKECNTIGINGMLFNTNKEGTLAFYTPDDITLNNSVALNPIDISIELNKAKSDLEESKEWIRRSNQK
LDSIEDKIEEILSKIYHIENEIARIKKLIGEAEPEA
SEQ ID NO: 68 PIV200301
MPISILLIITTMIMASHCQIDITKLQHVGVLVNSPKGMKISQNFETRYLILSLIPKIEDSNSCGDQQIKQYKRLLDRLIIPL
YDGLRLQKDVIVTNQESNENTDPRTERFFGGVIGTIALGVATSAQITAAVALVEAKQARSDIEKLKEAIRDTNKAVQS
VQSSVGNLIVAIKSVQDYVNKEIVPSIARLGCEAAGLQLGIALDQHYSELTNIFGDNIGSLQEKGIKLQGIASLYRTNIT
EIFTTSTVDKYDIYDLLFTESIKVRVIDVDLNDYSITLQVRLPLLTRLLNTQIYKVDSISYNIQNREWYIPLPSHIMTKGAF
LGGADVKECIEAPSSYICPSDPGFVLNHEMESCLSGNISQCPRTTVTSDIVPRYAFVNGGVVANCITTTCTCNGIGNR
INQPPDQGVKIITHKECNTIGINGMLFNTNKEGTLAFYTPDDITLNNSVALNPIDISIELNKAKSDLEESKEWIRRSNQ
KLDSIEDKIEEILSKIYHIENEIARIKKLIGEAEPEA
SEQ ID NO: 69 PIV200302
MPISILLIITTMIMASHCQIDITKLQHVGVLVNSPKGMKISQNFETRYLILSLIPKIEDSNSCGDQQIKQYKRLLDRLIIPL
YDGLRLQKDVIVTNQESNENTDPRTERFFGGVIGTIALGVATSAQITAAVALVEAKQARSDIEKLKEAIRDTNKAVQS
VQSSPGNLIVAIKSVQDYVNKEIVPSIARLGCEAAGLQLGIALTQHYSELTNIFGDNIGSLQEKGIKLQGIASLYRTNIT
EIFTTSTVDKYDIYDLLFTESIKVRVIDVDLNDYSITLQVRLPLLTRLLNTQIYKVDSISYNIQNREWYIPLPSHIMTKGAF
LGGADVKECIEAFSSYICPSDPGFVLNHEMESCLSGNISQCPRTLVTSDIVPRYAFVNGGVVANCITTTCTCNGIGNR
INQPPDQGVKIITHKECNTIGINGMLFNTNKEGTLAFYTPDDITLNNSVALNPIDISIELNKAKSDLEESKEWIRRSNQ
KLDSIEDKIEEILSKIYHIENEIARIKKLIGEAEPEA
SEQ ID NO: 70 PIV200303
MPISILLIITTMIMASHCQIDITKLQHVGVLVNSPKGMKISQNFETRYLILSLIPKIEDSNSCGDQQIKQYKRLLDRLIIPL
YDGLRLQKDVIVTNQESNENTDPRTERFFGGVIGTIALGVATSAQITAAVALVEAKQARSDIEKLKEAIRDTNKAVQS
VQSSVGNLIVAIKSVQDYVNKEIVPSIARLGCEAAGLLLGIALTQHYSELTNIFGDNIGSLQEKGIKLQGIASLYRTNITE
IFTTSTVDKYDIYDLLFTESIKVRVIDVDLNDYSITLQVRLPLLTRLLNTQIYKVDSISYNIQNREWYIPLPSHIMTKGAFL
GGADVKECIEAFSSYICPSDPGFVLNHEMESCLSGNISQCPRTLVTSDIVPRYAFVNGGVVANCITTTCTCNGIGNRI
NQPPDQGVKIITHKECNTIGINGMLFNTNKEGTLAFYTPDDITLNNSVALNPIDISIELNKAKSDLEESKEWIRRSNQK
LDSIEDKIEEILSKIYHIENEIARIKKLIGEAEPEA
SEQ ID NO: 71 PIV200304
MPISILLIITTMIMASHCQIDITKLQHVGVLVNSPKGMKISQNFETRYLILSLIPKIEDSNSCGDQQIKQYKRLLDRLIIPL
YDGLRLQKDVIVTNQESNENTDPRTERFFGGVIGTIALGVATSAQITAAVALVEAKQARSDIEKLKEAIRDTNKAVQS
VQSSVGNLIVAIKSVQDYVNKEIVPSIARLGCEAAGLQLGIALDQHYSELTNIFGDNIGSLQEKGIKLQGIASLYRTNIT
EIFTTSTVDKYDIYDLLFTESIKVRVIDVDLNDYSITLQVRLPLLTRLLNTQIYKVDSISYNIQNREWYIPLPSHIMTKGAF
LGGADVKECIEAFSSYICPSDPGFVLNHEMESCLSGNISQCPRTLVTSDIVPRYAFVNGGVVANCITTTCTCNGIGNR
INQPPDQGVKIITHKECNTIGINGMLFNTNKEGTLAFYTPDDITLNNSVALNPIDISIELNKAKSDLEESKEWIRRSNQ
KLDSIEDKIEEILSKIYHIENEIARIKKLIGEAEPEA
SEQ ID NO: 72 PIV200305
MPISILLIITTMIMASHCQIDITKLQHVGVLVNSPKGMKIPQNFETRYLILSLIPKIEDSNSCGDQQIKQYKRLLDRLIIPL
YDGLRLMKDVIVTNQESNENTDPRTERFFGGVIGTIALGVATSAQITAAVALVEAKQARSDIEKLKEAIRDTNKAVQ
SVQSSVGNLIVAIKSVQDYVNKEIVPSIARLGCEAAGLQLGIALTQHYSELTNIFGDNIGSLIEKGIKLQGIASLYRTNIT
EIFTTSTVDKYDIYDLLFTESIKVRVIDVDLNDYSITLQVRLPLLTRLLNTQIYKVDSISYNIQNREWYIPLPSHIMTKGAF
LGGADVKECIEAFSSYICPSDPGFVLNHEMESCLSGNISQCPRTTVTSDIVPRYAFVNGGVVANCITTTCTCNGIGNR
INQPPDQGVKIITHKECNTIGINGMLFNTNKEGTLAFYTPDDITLNNSVALNPIDISIELNKAKSDLEESKEWIRRSNQ
KLDSIEDKIEEILSKIYHIENEIARIKKLIGEAEPEA
SEQ ID NO: 73 PIV200306
MPISILLIITTMIMASHCQIDITKLQHVGVLVNSPKGCKISQNFETRYLILSLIPKIEDSNSCGDQQIKQYKRLLDRLIIPL
YDGLRLMKDVIVTNQESNENTDPRTERFFGGVIGTIALGVATSAQITAAVALVEAKQARSDIEKLKEAIRDTNKAVQ
SVQSSVGNLIVAIKSVQDYVNKEIVPSIARLGCEAAGLQLGIALTQHYSELTNIFGDNIGSLIEKGIKLQGIASLYRTNIT
EIFTTSTVDKYDIYDLLFTESIKVRVIDVDLNDYSITLQVRLPLLTRLLNCQIYKVDSISYNIQNREWYIPLPSHIMTKGAF
LGGADVKECIEAFSSYICPSDPGFVLNHEMESCLSGNISQCPRTTVTSDIVPRYAFVNGGVVANCITTTCTCNGIGNR
INQPPDQGVKIITHKECNTIGINGMLFNTNKEGTLAFYTPDDITLNNSVALNPIDISIELNKAKSDLEESKEWIRRSNQ
KLDSIEDKIEEILSKIYHIENEIARIKKLIGEAEPEA
SEQ ID NO: 74 PIV200307
MPISILLIITTMIMASHCQIDITKLQHVGVLVNSPKGMKISQNFETRYLILSLIPKIEDSNSCGDQQIKQYKRLLDRLIIPL
YDCLRLMKDVIVTNQESNENTDPRTERFFGGVIGTIALGVATSAQITAAVALVEAKQARSDIEKLKEAIRDTNKAVQ
SVQSSVGNLIVAIKSVQDYVNKEIVPSIARLGCEAAGLQLGIALTQHYSELTNIFGDNIGSCIEKGIKLQGIASLYRTNIT
EIFTTSTVDKYDIYDLLFTESIKVRVIDVDLNDYSITLQVRLPLLTRLLNTQIYKVDSISYNIQNREWYIPLPSHIMTKGAF
LGGADVKECIEAFSSYICPSDPGFVLNHEMESCLSGNISQCPRTTVTSDIVPRYAFVNGGVVANCITTTCTCNGIGNR
INQPPDQGVKIITHKECNTIGINGMLFNTNKEGTLAFYTPDDITLNNSVALNPIDISIELNKAKSDLEESKEWIRRSNQ
KLDSIEDKIEEILSKIYHIENEIARIKKLIGEAEPEA
SEQ ID NO: 75 PIV200308
MPISILLIITTMIMASHCQIDITKLQHVGVLVNSPKGMKISQNFETRYLILSLIPKIEDSNSCGDQQIKQYKRLLDRLIIPL
YDGLRLMKDVIVTNQESNENTDPRTERFFGGVIGTIALGVATSAQITAAVALVEAKQARSDIEKLKEAIRDTNKAVQ
SVQSSVGPLIVAIKSVQDYVNKEIVPSIARLGCEAAGLQLGIALTQHYSELTNIFGDNIGSLIEKGIKLQGIASLYRTNITE
IFTTSTVDKYDIYDLLFTESIKVRVIDVDLNDYSITLQVRLPLLTRLLNTQIYKVDSISYNIQNREWYIPLPSHIMTKGAFL
GGADVKECIEAFSSYICPSDPGFVLNHEMESCLSGNISQCPRTTVTSDIVPRYAFVNGGVVANCITTTCTCNGIGNRI
NQPPDQGVKIITHKECNTIGINGMLFNTNKEGTLAFYTPDDITLNNSVALNPIDISIELNKAKSDLEESKEWIRRSNQK
LDSIEDKIEEILSKIYHIENEIARIKKLIGEAEPEA
SEQ ID NO: 76 PIV200309
MPISILLIITTMIMASHCQIDITKLQHVGVLVNSPKGMKISQNFETRYLILSLIPKIEDSNSCGDQQIKQYKRLLDRLIIPL
YDGLRLMKDVIVTNQESNENTDPRTERFFGGVIGTIALGVATSAQITAAVALVEAKQARSDIEKLKEAIRDTNKAVQ
SVQSSVGNPIVAIKSVQDYVNKEIVPSIARLGCEAAGLQLGIALTQHYSELTNIFGDNIGSLIEKGIKLQGIASLYRTNIT
EIFTTSTVDKYDIYDLLFTESIKVRVIDVDLNDYSITLQVRLPLLTRLLNTQIYKVDSISYNIQNREWYIPLPSHIMTKGAF
LGGADVKECIEAFSSYICPSDPGFVLNHEMESCLSGNISQCPRTTVTSDIVPRYAFVNGGVVANCITTTCTCNGIGNR
INQPPDQGVKIITHKECNTIGINGMLFNTNKEGTLAFYTPDDITLNNSVALNPIDISIELNKAKSDLEESKEWIRRSNQ
KLDSIEDKIEEILSKIYHIENEIARIKKLIGEAEPEA
SEQ ID NO: 77 PIV200310
MPISILLIITTMIMASHCQIDITKLQHVGVLVNSPKGMKISQNFETRYLILSLIPKIEDSNSCGDQQIKQYKRLLDRLIIPL
YDGLRLMKDVIVTNQESNENTDPRTERFFGGVIGTIALGVATSAQITAAVALVEAKQARSDIEKLKEAIRDTNKAVQ
SVQSSVGNLIVAIKSVQDYVNKEIVPSIARLGCEAAGLQLGIALTQHYSELTNIFGDNIGSLIEKGIKLQGIASLYRTNIT
EIFTTSTVDKYDIYDLLFTESIKVRVIDVDLNDYSITLQVRLPLLTRLLNTQIYKVDSISYNIQNREWYIPLPSHIMTKGAF
LGGADVKECIEAFSSYICPSDPGFVLNHEMESCLSGNISQCPRTTVTSDIVPRYAFVNGGVVANCITTTCTCNGIGNR
INQPPDQGVKIITHKECNTIGINGMLFNTNKEGTLPFYTPDDITLNNSVALNPIDISIELNKAKSDLEESKEWIRRSNQ
KLDSIEDKIEEILSKIYHIENEIARIKKLIGEAEPEA
SEQ ID NO: 78 PIV200311
MPISILLIITTMIMASHCQIDITKLQHVGVLVNSPKGMKISQNFETRYLILSLIPKIEDSNSCGDQQIKQYKRLLDRLIIPL
YDGLRLMKDVIVTNQESNENTDPRTERFFGGVIGTIALGVATSAQITAAVALVEAKQARSDIEKLKEAIRDTNKAVQ
SVQSSVGNLIVAIKSVQDYVNKEIVPSIARLGCEAAGLQLGIALTQHYSELTNIFGDNIGSLIEKGIKLQGIASLYRTNIT
EIFTTSTVDKYDIYDLLFTESIKVRVIDVDLNDYSITLQVRLPLLTRLLNTQIYKVDSISYNIQNREWYIPLPSHIMTKGAF
LGGADVKECIEAPSSYICPSDPGFVLNHEMESCLSGNISQCPRTTVTSDIVPRYAFVNGGVVANCITTTCTCNGIGNR
INQPPDQGVKIITHKECNTIGINGMLFNTNKEGTLAFYTPDDITLNNSVALNPIDISIELNKAKSDLEESKEWIRRSNQ
KLDSIEDKIEEILSKIYHIENEIARIKKLIGEAEPEA
SEQ ID NO: 79 PIV200312
MPISILLIITTMIMASHCQIDITKLQHVGVLVNSPKGMKISQNFETRYLILSLIPKIEDSNSCGDQQIKQYKRLLDRLIIPL
YDGLRLMKDVIVTNQESNENTDPRTERFFGGVIGTIALGVATSAQITAAVALVEAKQARSDIEKLKEAIRDTNKAVQ
SVQSSVGNLIVAIKSVQDYVNKEIVPSIARLGCEAAGLQLGIALTQHYSELTNIFGDNIGSLIEKGIKLQGIASLYRTNIT
EIFTTSTVDKYDIYDLLFTESIKVRVIDVDLNDYSITLQVRLPLLTRLLNTQIYKVDSISYNIQNREWYIPLPSHIMTKGAF
LGGADVKECIEAFSSYICPSDPGFVLNHEMESCLSGNISQCPRTLVTSDIVPRYAFVNGGVVANCITTTCTCNGIGNR
INQPPDQGVKIITHKECNTIGINGMLFNTNKEGTLAFYTPDDITLNNSVALNPIDISIELNKAKSDLEESKEWIRRSNQ
KLDSIEDKIEEILSKIYHIENEIARIKKLIGEAEPEA
SEQ ID NO: 80 PIV200313
MPISILLIITTMIMASHCQIDITKLQHVGVLVNSPKGMKISQNFETRYLILSLIPKIEDSNSCGDQQIKQYKRLLDRLIIPL
YDGLRLMKDVIVTNQESNENTDPRTERFFGGVIGTIALGVATSAQITAAVALVEAKQARSDIEKLKEAIRDTNKAVQ
SVQSSPGNLIVAIKSVQDYVNKEIVPSIARLGCEAAGLQLGIALTQHYSELTNIFGDNIGSLIEKGIKLQGIASLYRTNIT
EIFTTSTVDKYDIYDLLFTESIKVRVIDVDLNDYSITLQVRLPLLTRLLNTQIYKVDSISYNIQNREWYIPLPSHIMTKGAF
LGGADVKECIEAFSSYICPSDPGFVLNHEMESCLSGNISQCPRTTVTSDIVPRYAFVNGGVVANCITTTCTCNGIGNR
INQPPDQGVKIITHKECNTIGINGMLFNTNKEGTLAFYTPDDITLNNSVALNPIDISIELNKAKSDLEESKEWIRRSNQ
KLDSIEDKIEEILSKIYHIENEIARIKKLIGEAEPEA
SEQ ID NO: 81 PIV200314
MPISILLIITTMIMASHCQIDITKLQHVGVLVNSPKGMKISQNFETRYLILSLIPKIEDSNSCGDQQIKQYKRLLDRLIIPL
YDGLRLMKDVIVTNQESNENTDPRTERFFGGVIGTIALGVATSAQITAAVALVEAKQARSDIEKLKEAIRDTNKAVQ
SVQSSVGNLIVAIKSVQDYVNKEIVPSIARLGCEAAGLLLGIALTQHYSELTNIFGDNIGSLIEKGIKLQGIASLYRTNITE
IFTTSTVDKYDIYDLLFTESIKVRVIDVDLNDYSITLQVRLPLLTRLLNTQIYKVDSISYNIQNREWYIPLPSHIMTKGAFL
GGADVKECIEAFSSYICPSDPGFVLNHEMESCLSGNISQCPRTTVTSDIVPRYAFVNGGVVANCITTTCTCNGIGNRI
NQPPDQGVKIITHKECNTIGINGMLFNTNKEGTLAFYTPDDITLNNSVALNPIDISIELNKAKSDLEESKEWIRRSNQK
LDSIEDKIEEILSKIYHIENEIARIKKLIGEAEPEA
SEQ ID NO: 82 PIV200315
MPISILLIITTMIMASHCQIDITKLQHVGVLVNSPKGMKISQNFETRYLILSLIPKIEDSNSCGDQQIKQYKRLLDRLIIPL
YDGLRLMKDVIVTNQESNENTDPRTERFFGGVIGTIALGVATSAQITAAVALVEAKQARSDIEKLKEAIRDTNKAVQ
SVQSSVGNLIVAIKSVQDYVNKEIVPSIARLGCEAAGLQLGIALDQHYSELTNIFGDNIGSLIEKGIKLQGIASLYRTNIT
EIFTTSTVDKYDIYDLLFTESIKVRVIDVDLNDYSITLQVRLPLLTRLLNTQIYKVDSISYNIQNREWYIPLPSHIMTKGAF
LGGADVKECIEAFSSYICPSDPGFVLNHEMESCLSGNISQCPRTTVTSDIVPRYAFVNGGVVANCITTTCTCNGIGNR
INQPPDQGVKIITHKECNTIGINGMLFNTNKEGTLAFYTPDDITLNNSVALNPIDISIELNKAKSDLEESKEWIRRSNQ
KLDSIEDKIEEILSKIYHIENEIARIKKLIGEAEPEA
SEQ ID NO: 83 PIV200316
MPISILLIITTMIMASHCQIDITKLQHVGVLVNSPKGMKIPQNFETRYLILSLIPKIEDSNSCGDQQIKQYKRLLDRLIIPL
YDGLRLQKDVIVTNQESNENTDPRTERFFGGVIGTIALGVATSAQITAAVALVEAKQARSDIEKLKEAIRDTNKAVQS
VQSSVGNLIVAIKSVQDYVNKEIVPCIARLGCEACGLQLGIALTQHYSELTNIFGDNIGSLQEKGIKLQGIASLYRTNIT
EIFTTSTVDKYDIYDLLFTESIKVRVIDVDLNDYSITLQVRLPLLTRLLNTQIYKVDSISYNIQNREWYIPLPSHIMTKGAF
LGGADVKECIEAFSSYICPSDPGFVLNHEMESCLSGNISQCPRTTVTSDIVPRYAFVNGGVVANCITTTCTCNGIGNR
INQPPDQGVKIITHKECNTIGINGMLFNTNKEGTLAFYTPDDITLNNSVALNPIDISIELNKAKSDLEESKEWIRRSNQ
KLDSIEDKIEEILSKIYHIENEIARIKKLIGEAEPEA
SEQ ID NO: 84 PIV200317
MPISILLIITTMIMASHCQIDITKLQHVGVLVNSPKGCKISQNFETRYLILSLIPKIEDSNSCGDQQIKQYKRLLDRLIIPL
YDGLRLQKDVIVTNQESNENTDPRTERFFGGVIGTIALGVATSAQITAAVALVEAKQARSDIEKLKEAIRDTNKAVQS
VQSSVGNLIVAIKSVQDYVNKEIVPCIARLGCEACGLQLGIALTQHYSELTNIFGDNIGSLQEKGIKLQGIASLYRTNIT
EIFTTSTVDKYDIYDLLFTESIKVRVIDVDLNDYSITLQVRLPLLTRLLNCQIYKVDSISYNIQNREWYIPLPSHIMTKGAF
LGGADVKECIEAFSSYICPSDPGFVLNHEMESCLSGNISQCPRTTVTSDIVPRYAFVNGGVVANCITTTCTCNGIGNR
INQPPDQGVKIITHKECNTIGINGMLFNTNKEGTLAFYTPDDITLNNSVALNPIDISIELNKAKSDLEESKEWIRRSNQ
KLDSIEDKIEEILSKIYHIENEIARIKKLIGEAEPEA
SEQ ID NO: 85 PIV200318
MPISILLIITTMIMASHCQIDITKLQHVGVLVNSPKGMKISQNFETRYLILSLIPKIEDSNSCGDQQIKQYKRLLDRLIIPL
YDCLRLQKDVIVTNQESNENTDPRTERFFGGVIGTIALGVATSAQITAAVALVEAKQARSDIEKLKEAIRDTNKAVQS
VQSSVGNLIVAIKSVQDYVNKEIVPCIARLGCEACGLQLGIALTQHYSELTNIFGDNIGSCQEKGIKLQGIASLYRTNIT
EIFTTSTVDKYDIYDLLFTESIKVRVIDVDLNDYSITLQVRLPLLTRLLNTQIYKVDSISYNIQNREWYIPLPSHIMTKGAF
LGGADVKECIEAFSSYICPSDPGFVLNHEMESCLSGNISQCPRTTVTSDIVPRYAFVNGGVVANCITTTCTCNGIGNR
INQPPDQGVKIITHKECNTIGINGMLFNTNKEGTLAFYTPDDITLNNSVALNPIDISIELNKAKSDLEESKEWIRRSNQ
KLDSIEDKIEEILSKIYHIENEIARIKKLIGEAEPEA
SEQ ID NO: 86 PIV200319
MPISILLIITTMIMASHCQIDITKLQHVGVLVNSPKGMKISQNFETRYLILSLIPKIEDSNSCGDQQIKQYKRLLDRLIIPL
YDGLRLQKDVIVTNQESNENTDPRTERFFGGVIGTIALGVATSAQITAAVALVEAKQARSDIEKLKEAIRDTNKAVQS
VQSSVGPLIVAIKSVQDYVNKEIVPCIARLGCEACGLQLGIALTQHYSELTNIFGDNIGSLQEKGIKLQGIASLYRTNITE
IFTTSTVDKYDIYDLLFTESIKVRVIDVDLNDYSITLQVRLPLLTRLLNTQIYKVDSISYNIQNREWYIPLPSHIMTKGAFL
GGADVKECIEAFSSYICPSDPGFVLNHEMESCLSGNISQCPRTTVTSDIVPRYAFVNGGVVANCITTTCTCNGIGNRI
NQPPDQGVKIITHKECNTIGINGMLFNTNKEGTLAFYTPDDITLNNSVALNPIDISIELNKAKSDLEESKEWIRRSNQK
LDSIEDKIEEILSKIYHIENEIARIKKLIGEAEPEA
SEQ ID NO: 87 PIV200320
MPISILLIITTMIMASHCQIDITKLQHVGVLVNSPKGMKISQNFETRYLILSLIPKIEDSNSCGDQQIKQYKRLLDRLIIPL
YDGLRLQKDVIVTNQESNENTDPRTERFFGGVIGTIALGVATSAQITAAVALVEAKQARSDIEKLKEAIRDTNKAVQS
VQSSVGNPIVAIKSVQDYVNKEIVPCIARLGCEACGLQLGIALTQHYSELTNIFGDNIGSLQEKGIKLQGIASLYRTNIT
EIFTTSTVDKYDIYDLLFTESIKVRVIDVDLNDYSITLQVRLPLLTRLLNTQIYKVDSISYNIQNREWYIPLPSHIMTKGAF
LGGADVKECIEAFSSYICPSDPGFVLNHEMESCLSGNISQCPRTTVTSDIVPRYAFVNGGVVANCITTTCTCNGIGNR
INQPPDQGVKIITHKECNTIGINGMLFNTNKEGTLAFYTPDDITLNNSVALNPIDISIELNKAKSDLEESKEWIRRSNQ
KLDSIEDKIEEILSKIYHIENEIARIKKLIGEAEPEA
SEQ ID NO: 88 PIV200321
MPISILLIITTMIMASHCQIDITKLQHVGVLVNSPKGMKISQNFETRYLILSLIPKIEDSNSCGDQQIKQYKRLLDRLIIPL
YDGLRLQKDVIVTNQESNENTDPRTERFFGGVIGTIALGVATSAQITAAVALVEAKQARSDIEKLKEAIRDTNKAVQS
VQSSVGNLIVAIKSVQDYVNKEIVPCIARLGCEACGLQLGIALTQHYSELTNIFGDNIGSLQEKGIKLQGIASLYRTNIT
EIFTTSTVDKYDIYDLLFTESIKVRVIDVDLNDYSITLQVRLPLLTRLLNTQIYKVDSISYNIQNREWYIPLPSHIMTKGAF
LGGADVKECIEAFSSYICPSDPGFVLNHEMESCLSGNISQCPRTTVTSDIVPRYAFVNGGVVANCITTTCTCNGIGNR
INQPPDQGVKIITHKECNTIGINGMLFNTNKEGTLPFYTPDDITLNNSVALNPIDISIELNKAKSDLEESKEWIRRSNQ
KLDSIEDKIEEILSKIYHIENEIARIKKLIGEAEPEA
SEQ ID NO: 89 PIV200322
MPISILLIITTMIMASHCQIDITKLQHVGVLVNSPKGMKISQNFETRYLILSLIPKIEDSNSCGDQQIKQYKRLLDRLIIPL
YDGLRLQKDVIVTNQESNENTDPRTERFFGGVIGTIALGVATSAQITAAVALVEAKQARSDIEKLKEAIRDTNKAVQS
VQSSVGNLIVAIKSVQDYVNKEIVPCIARLGCEACGLQLGIALTQHYSELTNIFGDNIGSLQEKGIKLQGIASLYRTNIT
EIFTTSTVDKYDIYDLLFTESIKVRVIDVDLNDYSITLQVRLPLLTRLLNTQIYKVDSISYNIQNREWYIPLPSHIMTKGAF
LGGADVKECIEAPSSYICPSDPGFVLNHEMESCLSGNISQCPRTTVTSDIVPRYAFVNGGVVANCITTTCTCNGIGNR
INQPPDQGVKIITHKECNTIGINGMLFNTNKEGTLAFYTPDDITLNNSVALNPIDISIELNKAKSDLEESKEWIRRSNQ
KLDSIEDKIEEILSKIYHIENEIARIKKLIGEAEPEA
SEQ ID NO: 90 PIV200323
MPISILLIITTMIMASHCQIDITKLQHVGVLVNSPKGMKISQNFETRYLILSLIPKIEDSNSCGDQQIKQYKRLLDRLIIPL
YDGLRLQKDVIVTNQESNENTDPRTERFFGGVIGTIALGVATSAQITAAVALVEAKQARSDIEKLKEAIRDTNKAVQS
VQSSVGNLIVAIKSVQDYVNKEIVPCIARLGCEACGLQLGIALTQHYSELTNIFGDNIGSLQEKGIKLQGIASLYRTNIT
EIFTTSTVDKYDIYDLLFTESIKVRVIDVDLNDYSITLQVRLPLLTRLLNTQIYKVDSISYNIQNREWYIPLPSHIMTKGAF
LGGADVKECIEAFSSYICPSDPGFVLNHEMESCLSGNISQCPRTLVTSDIVPRYAFVNGGVVANCITTTCTCNGIGNR
INQPPDQGVKIITHKECNTIGINGMLFNTNKEGTLAFYTPDDITLNNSVALNPIDISIELNKAKSDLEESKEWIRRSNQ
KLDSIEDKIEEILSKIYHIENEIARIKKLIGEAEPEA
SEQ ID NO: 91 PIV200324
MPISILLIITTMIMASHCQIDITKLQHVGVLVNSPKGMKISQNFETRYLILSLIPKIEDSNSCGDQQIKQYKRLLDRLIIPL
YDGLRLMKDVIVTNQESNENTDPRTERFFGGVIGTIALGVATSAQITAAVALVEAKQARSDIEKLKEAIRDTNKAVQ
SVQSSVGNLIVAIKSVQDYVNKEIVPCIARLGCEACGLQLGIALTQHYSELTNIFGDNIGSLIEKGIKLQGIASLYRTNIT
EIFTTSTVDKYDIYDLLFTESIKVRVIDVDLNDYSITLQVRLPLLTRLLNTQIYKVDSISYNIQNREWYIPLPSHIMTKGAF
LGGADVKECIEAFSSYICPSDPGFVLNHEMESCLSGNISQCPRTTVTSDIVPRYAFVNGGVVANCITTTCTCNGIGNR
INQPPDQGVKIITHKECNTIGINGMLFNTNKEGTLAFYTPDDITLNNSVALNPIDISIELNKAKSDLEESKEWIRRSNQ
KLDSIEDKIEEILSKIYHIENEIARIKKLIGEAEPEA
SEQ ID NO: 92 PIV200325
MPISILLIITTMIMASHCQIDITKLQHVGVLVNSPKGMKISQNFETRYLILSLIPKIEDSNSCGDQQIKQYKRLLDRLIIPL
YDGLRLQKDVIVTNQESNENTDPRTERFFGGVIGTIALGVATSAQITAAVALVEAKQARSDIEKLKEAIRDTNKAVQS
VQSSPGNLIVAIKSVQDYVNKEIVPCIARLGCEACGLQLGIALTQHYSELTNIFGDNIGSLQEKGIKLQGIASLYRTNIT
EIFTTSTVDKYDIYDLLFTESIKVRVIDVDLNDYSITLQVRLPLLTRLLNTQIYKVDSISYNIQNREWYIPLPSHIMTKGAF
LGGADVKECIEAFSSYICPSDPGFVLNHEMESCLSGNISQCPRTTVTSDIVPRYAFVNGGVVANCITTTCTCNGIGNR
INQPPDQGVKIITHKECNTIGINGMLFNTNKEGTLAFYTPDDITLNNSVALNPIDISIELNKAKSDLEESKEWIRRSNQ
KLDSIEDKIEEILSKIYHIENEIARIKKLIGEAEPEA
SEQ ID NO: 93 PIV200326
MPISILLIITTMIMASHCQIDITKLQHVGVLVNSPKGMKISQNFETRYLILSLIPKIEDSNSCGDQQIKQYKRLLDRLIIPL
YDGLRLQKDVIVTNQESNENTDPRTERFFGGVIGTIALGVATSAQITAAVALVEAKQARSDIEKLKEAIRDTNKAVQS
VQSSVGNLIVAIKSVQDYVNKEIVPCIARLGCEACGLLLGIALTQHYSELTNIFGDNIGSLQEKGIKLQGIASLYRTNITE
IFTTSTVDKYDIYDLLFTESIKVRVIDVDLNDYSITLQVRLPLLTRLLNTQIYKVDSISYNIQNREWYIPLPSHIMTKGAFL
GGADVKECIEAFSSYICPSDPGFVLNHEMESCLSGNISQCPRTTVTSDIVPRYAFVNGGVVANCITTTCTCNGIGNRI
NQPPDQGVKIITHKECNTIGINGMLFNTNKEGTLAFYTPDDITLNNSVALNPIDISIELNKAKSDLEESKEWIRRSNQK
LDSIEDKIEEILSKIYHIENEIARIKKLIGEAEPEA
SEQ ID NO: 94 PIV200327
MPISILLIITTMIMASHCQIDITKLQHVGVLVNSPKGMKISQNFETRYLILSLIPKIEDSNSCGDQQIKQYKRLLDRLIIPL
YDGLRLQKDVIVTNQESNENTDPRTERFFGGVIGTIALGVATSAQITAAVALVEAKQARSDIEKLKEAIRDTNKAVQS
VQSSVGNLIVAIKSVQDYVNKEIVPCIARLGCEACGLQLGIALDQHYSELTNIFGDNIGSLQEKGIKLQGIASLYRTNIT
EIFTTSTVDKYDIYDLLFTESIKVRVIDVDLNDYSITLQVRLPLLTRLLNTQIYKVDSISYNIQNREWYIPLPSHIMTKGAF
LGGADVKECIEAFSSYICPSDPGFVLNHEMESCLSGNISQCPRTTVTSDIVPRYAFVNGGVVANCITTTCTCNGIGNR
INQPPDQGVKIITHKECNTIGINGMLFNTNKEGTLAFYTPDDITLNNSVALNPIDISIELNKAKSDLEESKEWIRRSNQ
KLDSIEDKIEEILSKIYHIENEIARIKKLIGEAEPEA
SEQ ID NO: 95 PIV200328
MPISILLIITTMIMASHCQIDITKLQHVGVLVNSPKGMKISQNFETRYLILSLIPKIEDSNSCGDQQIKQYKRLLDRLIIPL
YDGLRLQKDVIVTNQESNENTDPRTERFFGGVIGTIALGVATSAQITAAVALVEAKQARSDIEKLKEAIRDTNKAVQS
VQSSPGNLIVAIKSVQDYVNKEIVPSIARLGCEAAGLLLGIALTQHYSELTNIFGDNIGSLQEKGIKLQGIASLYRTNITE
IFTTSTVDKYDIYDLLFTESIKVRVIDVDLNDYSITLQVRLPLLTRLLNTQIYKVDSISYNIQNREWYIPLPSHIMTKGAFL
GGADVKECIEAFSSYICPSDPGFVLNHEMESCLSGNISQCPRTTVTSDIVPRYAFVNGGVVANCITTTCTCNGIGNRI
NQPPDQGVKIITHKECNTIGINGMLFNTNKEGTLAFYTPDDITLNNSVALNPIDISIELNKAKSDLEESKEWIRRSNQK
LDSIEDKIEEILSKIYHIENEIARIKKLIGEAEPEA
SEQ ID NO: 96 PIV200329
MPISILLIITTMIMASHCQIDITKLQHVGVLVNSPKGMKISQNFETRYLILSLIPKIEDSNSCGDQQIKQYKRLLDRLIIPL
YDGLRLQKDVIVTNQESNENTDPRTERFFGGVIGTIALGVATSAQITAAVALVEAKQARSDIEKLKEAIRDTNKAVQS
VQSSPGNLIVAIKSVQDYVNKEIVPSIARLGCEAAGLQLGIALDQHYSELTNIFGDNIGSLQEKGIKLQGIASLYRTNIT
EIFTTSTVDKYDIYDLLFTESIKVRVIDVDLNDYSITLQVRLPLLTRLLNTQIYKVDSISYNIQNREWYIPLPSHIMTKGAF
LGGADVKECIEAFSSYICPSDPGFVLNHEMESCLSGNISQCPRTTVTSDIVPRYAFVNGGVVANCITTTCTCNGIGNR
INQPPDQGVKIITHKECNTIGINGMLFNTNKEGTLAFYTPDDITLNNSVALNPIDISIELNKAKSDLEESKEWIRRSNQ
KLDSIEDKIEEILSKIYHIENEIARIKKLIGEAEPEA
SEQ ID NO: 97 PIV200330
MPISILLIITTMIMASHCQIDITKLQHVGVLVNSPKGMKISQNFETRYLILSLIPKIEDSNSCGDQQIKQYKRLLDRLIIPL
YDGLRLQKDVIVTNQESNENTDPRTERFFGGVIGTIALGVATSAQITAAVALVEAKQARSDIEKLKEAIRDTNKAVQS
VQSSVGNLIVAIKSVQDYVNKEIVPSIARLGCEAAGLLLGIALDQHYSELTNIFGDNIGSLQEKGIKLQGIASLYRTNITE
IFTTSTVDKYDIYDLLFTESIKVRVIDVDLNDYSITLQVRLPLLTRLLNTQIYKVDSISYNIQNREWYIPLPSHIMTKGAFL
GGADVKECIEAFSSYICPSDPGFVLNHEMESCLSGNISQCPRTTVTSDIVPRYAFVNGGVVANCITTTCTCNGIGNRI
NQPPDQGVKIITHKECNTIGINGMLFNTNKEGTLAFYTPDDITLNNSVALNPIDISIELNKAKSDLEESKEWIRRSNQK
LDSIEDKIEEILSKIYHIENEIARIKKLIGEAEPEA
SEQ ID NO: 98 PIV200721
MPISILLIITTMIMASHCQIDITKLQHVGVLVNSPKGMKISQNFETRYLILSLIPKIEDSNSCGDQQIKQYKRLLDRLIIPL
YDGLRLQKDVIVTNQESNENTDPRTERFFGGVIGTIALGVATSAQITAAVALVEAKQARSDIEKLKEAIRDTNKAVQS
VQSSVGNLIVAIKSVQDYVNKEIVPCIARLGCEACGLQLGIALTQHYSELTNIFGDNIGSLQEKGIKLQGIASLYRTNIT
EIFTTSTVDKYDIYDLLFTESIKVRVIDVDLNDYSITLQVRLPLLTRLLNTQIYKVDSISYNIQNREWYIPLPSHIMTKGAF
LGGADVKECIEAFSSYICPSDPGFVLNHEMESCLSGNISQCPRTTVTSDIVPRYAFVNGGVVANCITTTCTCNGIGNR
INQPPDQGVKIITHKECNTIGINGMLFNTNKEGTLAFYTPDDITLNNSVALNPIDISIELNKAKSDLEESKEWIRRSNQ
KLDSIEDKIEEILSKIYHIENEIARIKKLIGEAEPEA
SEQ ID NO: 99 PIV200722
MPISILLIITTMIMASHCQIDITKLQHVGVLVNSPKGMKISQNFETRYLILSLIPKIEDSNSCGDQQIKQYKRLLDRLIIPL
YDGLRLQKDVIVTNQESNENTDPRTERFFGGVIGTIALGVATSAQITAAVALVEAKQARSDIEKLKEAIRDTNKAVQS
VQSSPGNLIVAIKSVQDYVNKEIVPSIARLGCEAAGLQLGIALTQHYSELTNIFGDNIGSLQEKGIKLQGIASLYRTNIT
EIFTTSTVDKYDIYDLLFTESIKVRVIDVDLNDYSITLQVRLPLLTRLLNTQIYKVDSISYNIQNREWYIPLPSHIMTKGAF
LGGADVKECIEAFSSYICPSDPGFVLNHEMESCLSGNISQCPRTTVTSDIVPRYAFVNGGVVANCITTTCTCNGIGNR
INQPPDQGVKIITHKECNTIGINGMLFNTNKEGTLAFYTPDDITLNNSVALNPIDISIELNKAKSDLEESKEWIRRSNQ
KLDSIEDKIEEILSKIYHIENEIARIKKLIGEAEPEA
SEQ ID NO: 100 PIV200723
MPISILLIITTMIMASHCQIDITKLQHVGVLVNSPKGMKISQNFETRYLILSLIPKIEDSNSCGDQQIKQYKRLLDRLIIPL
YDGLRLQKDVIVTNQESNENTDPRTERFFGGVIGTIALGVATSAQITAAVALVEAKQARSDIEKLKEAIRDTNKAVQS
VQSSVGNLIVAIKSVQDYVNKEIVPSIARLGCEAAGLLLGIALTQHYSELTNIFGDNIGSLQEKGIKLQGIASLYRTNITE
IFTTSTVDKYDIYDLLFTESIKVRVIDVDLNDYSITLQVRLPLLTRLLNTQIYKVDSISYNIQNREWYIPLPSHIMTKGAFL
GGADVKECIEAFSSYICPSDPGFVLNHEMESCLSGNISQCPRTTVTSDIVPRYAFVNGGVVANCITTTCTCNGIGNRI
NQPPDQGVKIITHKECNTIGINGMLFNTNKEGTLAFYTPDDITLNNSVALNPIDISIELNKAKSDLEESKEWIRRSNQK
LDSIEDKIEEILSKIYHIENEIARIKKLIGEAEPEA
SEQ ID NO: 101 PIV200724
MPISILLIITTMIMASHCQIDITKLQHVGVLVNSPKGMKISQNFETRYLILSLIPKIEDSNSCGDQQIKQYKRLLDRLIIPL
YDGLRLQKDVIVTNQESNENTDPRTERFFGGVIGTIALGVATSAQITAAVALVEAKQARSDIEKLKEAIRDTNKAVQS
VQSSVGNLIVAIKSVQDYVNKEIVPSIARLGCEAAGLQLGIALDQHYSELTNIFGDNIGSLQEKGIKLQGIASLYRTNIT
EIFTTSTVDKYDIYDLLFTESIKVRVIDVDLNDYSITLQVRLPLLTRLLNTQIYKVDSISYNIQNREWYIPLPSHIMTKGAF
LGGADVKECIEAFSSYICPSDPGFVLNHEMESCLSGNISQCPRTTVTSDIVPRYAFVNGGVVANCITTTCTCNGIGNR
INQPPDQGVKIITHKECNTIGINGMLFNTNKEGTLAFYTPDDITLNNSVALNPIDISIELNKAKSDLEESKEWIRRSNQ
KLDSIEDKIEEILSKIYHIENEIARIKKLIGEAEPEA
SEQ ID NO: 102 PIV200878
MPISILLIITTMIMASHCQIDITKLQHVGVLVNSPKGMKIPQNFETRYLILSLIPKIEDSNSCGDQQIKQYKRLLDRLIIPL
YDGLRLMKDVIVTNQESNENTDPRTERFFGGVIGTIALGVATSAQITAAVALVEAKQARSDIEKLKEAIRDTNKAVQ
SVQSSVGNPIVAIKSVQDYVNKEIVPSIARLGCEAAGLQLGIALTQHYSELTNIFGDNIGSLIEKGIKLQGIASLYRTNIT
EIFTTSTVDKYDIYDLLFTESIKVRVIDVDLNDYSITLQVRLPLLTRLLNTQIYKVDSISYNIQNREWYIPLPSHIMTKGAF
LGGADVKECIEAFSSYICPSDPGFVLNHEMESCLSGNISQCPRTTVTSDIVPRYAFVNGGVVANCITTTCTCNGIGNR
INQPPDQGVKIITHKECNTIGINGMLFNTNKEGTLAFYTPDDITLNNSVALNPIDISIELNKAKSDLEESKEWIRRSNQ
KLDSIEDKIEEILSKIYHIENEIARIKKLIGEAEPEA
SEQ ID NO: 103 PIV200879
MPISILLIITTMIMASHCQIDITKLQHVGVLVNSPKGMKISQNFETRYLILSLIPKIEDSNSCGDQQIKQYKRLLDRLIIPL
YDGLRLMKDVIVTNQESNENTDPRTERFFGGVIGTIALGVATSAQITAAVALVEAKQARSDIEKLKEAIRDTNKAVQ
SVQSSVGPPIVAIKSVQDYVNKEIVPSIARLGCEAAGLQLGIALTQHYSELTNIFGDNIGSLIEKGIKLQGIASLYRTNIT
EIFTTSTVDKYDIYDLLFTESIKVRVIDVDLNDYSITLQVRLPLLTRLLNTQIYKVDSISYNIQNREWYIPLPSHIMTKGAF
LGGADVKECIEAFSSYICPSDPGFVLNHEMESCLSGNISQCPRTTVTSDIVPRYAFVNGGVVANCITTTCTCNGIGNR
INQPPDQGVKIITHKECNTIGINGMLFNTNKEGTLAFYTPDDITLNNSVALNPIDISIELNKAKSDLEESKEWIRRSNQ
KLDSIEDKIEEILSKIYHIENEIARIKKLIGEAEPEA
SEQ ID NO: 104 PIV200880
MPISILLIITTMIMASHCQIDITKLQHVGVLVNSPKGMKISQNFETRYLILSLIPKIEDSNSCGDQQIKQYKRLLDRLIIPL
YDGLRLMKDVIVTNQESNENTDPRTERFFGGVIGTIALGVATSAQITAAVALVEAKQARSDIEKLKEAIRDTNKAVQ
SVQSSVGNPIVAIKSVQDYVNKEIVPSIARLGCEAAGLLLGIALTQHYSELTNIFGDNIGSLIEKGIKLQGIASLYRTNITE
IFTTSTVDKYDIYDLLFTESIKVRVIDVDLNDYSITLQVRLPLLTRLLNTQIYKVDSISYNIQNREWYIPLPSHIMTKGAFL
GGADVKECIEAFSSYICPSDPGFVLNHEMESCLSGNISQCPRTTVTSDIVPRYAFVNGGVVANCITTTCTCNGIGNRI
NQPPDQGVKIITHKECNTIGINGMLFNTNKEGTLAFYTPDDITLNNSVALNPIDISIELNKAKSDLEESKEWIRRSNQK
LDSIEDKIEEILSKIYHIENEIARIKKLIGEAEPEA
SEQ ID NO: 105 PIV200881
MPISILLIITTMIMASHCQIDITKLQHVGVLVNSPKGMKISQNFETRYLILSLIPKIEDSNSCGDQQIKQYKRLLDRLIIPL
YDGLRLMKDVIVTNQESNENTDPRTERFFGGVIGTIALGVATSAQITAAVALVEAKQARSDIEKLKEAIRDTNKAVQ
SVQSSVGNPIVAIKSVQDYVNKEIVPSIARLGCEAAGLQLGIALDQHYSELTNIFGDNIGSLIEKGIKLQGIASLYRTNIT
EIFTTSTVDKYDIYDLLFTESIKVRVIDVDLNDYSITLQVRLPLLTRLLNTQIYKVDSISYNIQNREWYIPLPSHIMTKGAF
LGGADVKECIEAFSSYICPSDPGFVLNHEMESCLSGNISQCPRTTVTSDIVPRYAFVNGGVVANCITTTCTCNGIGNR
INQPPDQGVKIITHKECNTIGINGMLFNTNKEGTLAFYTPDDITLNNSVALNPIDISIELNKAKSDLEESKEWIRRSNQ
KLDSIEDKIEEILSKIYHIENEIARIKKLIGEAEPEA
SEQ ID NO: 106 PIV200882
MPISILLIITTMIMASHCQIDITKLQHVGVLVNSPKGMKISQNFETRYLILSLIPKIEDSNSCGDQQIKQYKRLLDRLIIPL
YDGLRLMKDVIVTNQESNENTDPRTERFFGGVIGTIALGVATSAQITAAVALVEAKQARSDIEKLKEAIRDTNKAVQ
SVQSSVGNPIVAIKSVQDYVNKEIVPSIARLGCEAAGLQLGIALTQHYSELTNIFGDNIGSLIEKGIKLQGIASLYRTNIT
EIFTTSTVDKYDIYDLLFTESIKVRVIDVDLNDYSITLQVRLPLLTRLLNTQIYKVDSISYNIQNREWYIPLPSHIMTKGAF
LGGADVKECIEAPSSYICPSDPGFVLNHEMESCLSGNISQCPRTTVTSDIVPRYAFVNGGVVANCITTTCTCNGIGNR
INQPPDQGVKIITHKECNTIGINGMLFNTNKEGTLAFYTPDDITLNNSVALNPIDISIELNKAKSDLEESKEWIRRSNQ
KLDSIEDKIEEILSKIYHIENEIARIKKLIGEAEPEA
SEQ ID NO: 107 PIV200883
MPISILLIITTMIMASHCQIDITKLQHVGVLVNSPKGMKISQNFETRYLILSLIPKIEDSNSCGDQQIKQYKRLLDRLIIPL
YDGLRLMKDVIVTNQESNENTDPRTERFFGGVIGTIALGVATSAQITAAVALVEAKQARSDIEKLKEAIRDTNKAVQ
SVQSSVGNPIVAIKSVQDYVNKEIVPCIARLGCEACGLQLGIALTQHYSELTNIFGDNIGSLIEKGIKLQGIASLYRTNIT
EIFTTSTVDKYDIYDLLFTESIKVRVIDVDLNDYSITLQVRLPLLTRLLNTQIYKVDSISYNIQNREWYIPLPSHIMTKGAF
LGGADVKECIEAFSSYICPSDPGFVLNHEMESCLSGNISQCPRTTVTSDIVPRYAFVNGGVVANCITTTCTCNGIGNR
INQPPDQGVKIITHKECNTIGINGMLFNTNKEGTLAFYTPDDITLNNSVALNPIDISIELNKAKSDLEESKEWIRRSNQ
KLDSIEDKIEEILSKIYHIENEIARIKKLIGEAEPEA
SEQ ID NO: 108 PIV200884
MPISILLIITTMIMASHCQIDITKLQHVGVLVNSPKGMKIPQNFETRYLILSLIPKIEDSNSCGDQQIKQYKRLLDRLIIPL
YDGLRLMKDVIVTNQESNENTDPRTERFFGGVIGTIALGVATSAQITAAVALVEAKQARSDIEKLKEAIRDTNKAVQ
SVQSSVGPPIVAIKSVQDYVNKEIVPSIARLGCEAAGLQLGIALTQHYSELTNIFGDNIGSLIEKGIKLQGIASLYRTNIT
EIFTTSTVDKYDIYDLLFTESIKVRVIDVDLNDYSITLQVRLPLLTRLLNTQIYKVDSISYNIQNREWYIPLPSHIMTKGAF
LGGADVKECIEAFSSYICPSDPGFVLNHEMESCLSGNISQCPRTTVTSDIVPRYAFVNGGVVANCITTTCTCNGIGNR
INQPPDQGVKIITHKECNTIGINGMLFNTNKEGTLAFYTPDDITLNNSVALNPIDISIELNKAKSDLEESKEWIRRSNQ
KLDSIEDKIEEILSKIYHIENEIARIKKLIGEAEPEA
SEQ ID NO: 109 PIV200885
MPISILLIITTMIMASHCQIDITKLQHVGVLVNSPKGMKIPQNFETRYLILSLIPKIEDSNSCGDQQIKQYKRLLDRLIIPL
YDGLRLMKDVIVTNQESNENTDPRTERFFGGVIGTIALGVATSAQITAAVALVEAKQARSDIEKLKEAIRDTNKAVQ
SVQSSVGNPIVAIKSVQDYVNKEIVPSIARLGCEAAGLLLGIALTQHYSELTNIFGDNIGSLIEKGIKLQGIASLYRTNITE
IFTTSTVDKYDIYDLLFTESIKVRVIDVDLNDYSITLQVRLPLLTRLLNTQIYKVDSISYNIQNREWYIPLPSHIMTKGAFL
GGADVKECIEAFSSYICPSDPGFVLNHEMESCLSGNISQCPRTTVTSDIVPRYAFVNGGVVANCITTTCTCNGIGNRI
NQPPDQGVKIITHKECNTIGINGMLFNTNKEGTLAFYTPDDITLNNSVALNPIDISIELNKAKSDLEESKEWIRRSNQK
LDSIEDKIEEILSKIYHIENEIARIKKLIGEAEPEA
SEQ ID NO: 110 PIV200886
MPISILLIITTMIMASHCQIDITKLQHVGVLVNSPKGMKIPQNFETRYLILSLIPKIEDSNSCGDQQIKQYKRLLDRLIIPL
YDGLRLMKDVIVTNQESNENTDPRTERFFGGVIGTIALGVATSAQITAAVALVEAKQARSDIEKLKEAIRDTNKAVQ
SVQSSVGNPIVAIKSVQDYVNKEIVPSIARLGCEAAGLQLGIALDQHYSELTNIFGDNIGSLIEKGIKLQGIASLYRTNIT
EIFTTSTVDKYDIYDLLFTESIKVRVIDVDLNDYSITLQVRLPLLTRLLNTQIYKVDSISYNIQNREWYIPLPSHIMTKGAF
LGGADVKECIEAFSSYICPSDPGFVLNHEMESCLSGNISQCPRTTVTSDIVPRYAFVNGGVVANCITTTCTCNGIGNR
INQPPDQGVKIITHKECNTIGINGMLFNTNKEGTLAFYTPDDITLNNSVALNPIDISIELNKAKSDLEESKEWIRRSNQ
KLDSIEDKIEEILSKIYHIENEIARIKKLIGEAEPEA
SEQ ID NO: 111 PIV200887
MPISILLIITTMIMASHCQIDITKLQHVGVLVNSPKGMKIPQNFETRYLILSLIPKIEDSNSCGDQQIKQYKRLLDRLIIPL
YDGLRLMKDVIVTNQESNENTDPRTERFFGGVIGTIALGVATSAQITAAVALVEAKQARSDIEKLKEAIRDTNKAVQ
SVQSSVGNPIVAIKSVQDYVNKEIVPSIARLGCEAAGLQLGIALTQHYSELTNIFGDNIGSLIEKGIKLQGIASLYRTNIT
EIFTTSTVDKYDIYDLLFTESIKVRVIDVDLNDYSITLQVRLPLLTRLLNTQIYKVDSISYNIQNREWYIPLPSHIMTKGAF
LGGADVKECIEAPSSYICPSDPGFVLNHEMESCLSGNISQCPRTTVTSDIVPRYAFVNGGVVANCITTTCTCNGIGNR
INQPPDQGVKIITHKECNTIGINGMLFNTNKEGTLAFYTPDDITLNNSVALNPIDISIELNKAKSDLEESKEWIRRSNQ
KLDSIEDKIEEILSKIYHIENEIARIKKLIGEAEPEA
SEQ ID NO: 112 PIV200888
MPISILLIITTMIMASHCQIDITKLQHVGVLVNSPKGMKIPQNFETRYLILSLIPKIEDSNSCGDQQIKQYKRLLDRLIIPL
YDGLRLMKDVIVTNQESNENTDPRTERFFGGVIGTIALGVATSAQITAAVALVEAKQARSDIEKLKEAIRDTNKAVQ
SVQSSVGNPIVAIKSVQDYVNKEIVPCIARLGCEACGLQLGIALTQHYSELTNIFGDNIGSLIEKGIKLQGIASLYRTNIT
EIFTTSTVDKYDIYDLLFTESIKVRVIDVDLNDYSITLQVRLPLLTRLLNTQIYKVDSISYNIQNREWYIPLPSHIMTKGAF
LGGADVKECIEAFSSYICPSDPGFVLNHEMESCLSGNISQCPRTTVTSDIVPRYAFVNGGVVANCITTTCTCNGIGNR
INQPPDQGVKIITHKECNTIGINGMLFNTNKEGTLAFYTPDDITLNNSVALNPIDISIELNKAKSDLEESKEWIRRSNQ
KLDSIEDKIEEILSKIYHIENEIARIKKLIGEAEPEA
SEQ ID NO: 113 PIV200889
MPISILLIITTMIMASHCQIDITKLQHVGVLVNSPKGMKISQNFETRYLILSLIPKIEDSNSCGDQQIKQYKRLLDRLIIPL
YDGLRLMKDVIVTNQESNENTDPRTERFFGGVIGTIALGVATSAQITAAVALVEAKQARSDIEKLKEAIRDTNKAVQ
SVQSSVGPPIVAIKSVQDYVNKEIVPSIARLGCEAAGLLLGIALTQHYSELTNIFGDNIGSLIEKGIKLQGIASLYRTNITE
IFTTSTVDKYDIYDLLFTESIKVRVIDVDLNDYSITLQVRLPLLTRLLNTQIYKVDSISYNIQNREWYIPLPSHIMTKGAFL
GGADVKECIEAFSSYICPSDPGFVLNHEMESCLSGNISQCPRTTVTSDIVPRYAFVNGGVVANCITTTCTCNGIGNRI
NQPPDQGVKIITHKECNTIGINGMLFNTNKEGTLAFYTPDDITLNNSVALNPIDISIELNKAKSDLEESKEWIRRSNQK
LDSIEDKIEEILSKIYHIENEIARIKKLIGEAEPEA
SEQ ID NO: 114 PIV200890
MPISILLIITTMIMASHCQIDITKLQHVGVLVNSPKGMKISQNFETRYLILSLIPKIEDSNSCGDQQIKQYKRLLDRLIIPL
YDGLRLMKDVIVTNQESNENTDPRTERFFGGVIGTIALGVATSAQITAAVALVEAKQARSDIEKLKEAIRDTNKAVQ
SVQSSVGPPIVAIKSVQDYVNKEIVPSIARLGCEAAGLQLGIALDQHYSELTNIFGDNIGSLIEKGIKLQGIASLYRTNIT
EIFTTSTVDKYDIYDLLFTESIKVRVIDVDLNDYSITLQVRLPLLTRLLNTQIYKVDSISYNIQNREWYIPLPSHIMTKGAF
LGGADVKECIEAFSSYICPSDPGFVLNHEMESCLSGNISQCPRTTVTSDIVPRYAFVNGGVVANCITTTCTCNGIGNR
INQPPDQGVKIITHKECNTIGINGMLFNTNKEGTLAFYTPDDITLNNSVALNPIDISIELNKAKSDLEESKEWIRRSNQ
KLDSIEDKIEEILSKIYHIENEIARIKKLIGEAEPEA
SEQ ID NO: 115 PIV200891
MPISILLIITTMIMASHCQIDITKLQHVGVLVNSPKGMKISQNFETRYLILSLIPKIEDSNSCGDQQIKQYKRLLDRLIIPL
YDGLRLMKDVIVTNQESNENTDPRTERFFGGVIGTIALGVATSAQITAAVALVEAKQARSDIEKLKEAIRDTNKAVQ
SVQSSVGPPIVAIKSVQDYVNKEIVPSIARLGCEAAGLQLGIALTQHYSELTNIFGDNIGSLIEKGIKLQGIASLYRTNIT
EIFTTSTVDKYDIYDLLFTESIKVRVIDVDLNDYSITLQVRLPLLTRLLNTQIYKVDSISYNIQNREWYIPLPSHIMTKGAF
LGGADVKECIEAPSSYICPSDPGFVLNHEMESCLSGNISQCPRTTVTSDIVPRYAFVNGGVVANCITTTCTCNGIGNR
INQPPDQGVKIITHKECNTIGINGMLFNTNKEGTLAFYTPDDITLNNSVALNPIDISIELNKAKSDLEESKEWIRRSNQ
KLDSIEDKIEEILSKIYHIENEIARIKKLIGEAEPEA
SEQ ID NO: 116 PIV200892
MPISILLIITTMIMASHCQIDITKLQHVGVLVNSPKGMKISQNFETRYLILSLIPKIEDSNSCGDQQIKQYKRLLDRLIIPL
YDGLRLMKDVIVTNQESNENTDPRTERFFGGVIGTIALGVATSAQITAAVALVEAKQARSDIEKLKEAIRDTNKAVQ
SVQSSVGPPIVAIKSVQDYVNKEIVPCIARLGCEACGLQLGIALTQHYSELTNIFGDNIGSLIEKGIKLQGIASLYRTNIT
EIFTTSTVDKYDIYDLLFTESIKVRVIDVDLNDYSITLQVRLPLLTRLLNTQIYKVDSISYNIQNREWYIPLPSHIMTKGAF
LGGADVKECIEAFSSYICPSDPGFVLNHEMESCLSGNISQCPRTTVTSDIVPRYAFVNGGVVANCITTTCTCNGIGNR
INQPPDQGVKIITHKECNTIGINGMLFNTNKEGTLAFYTPDDITLNNSVALNPIDISIELNKAKSDLEESKEWIRRSNQ
KLDSIEDKIEEILSKIYHIENEIARIKKLIGEAEPEA
SEQ ID NO: 117 PIV200893
MPISILLIITTMIMASHCQIDITKLQHVGVLVNSPKGMKISQNFETRYLILSLIPKIEDSNSCGDQQIKQYKRLLDRLIIPL
YDGLRLMKDVIVTNQESNENTDPRTERFFGGVIGTIALGVATSAQITAAVALVEAKQARSDIEKLKEAIRDTNKAVQ
SVQSSVGNPIVAIKSVQDYVNKEIVPSIARLGCEAAGLLLGIALDQHYSELTNIFGDNIGSLIEKGIKLQGIASLYRTNIT
EIFTTSTVDKYDIYDLLFTESIKVRVIDVDLNDYSITLQVRLPLLTRLLNTQIYKVDSISYNIQNREWYIPLPSHIMTKGAF
LGGADVKECIEAFSSYICPSDPGFVLNHEMESCLSGNISQCPRTTVTSDIVPRYAFVNGGVVANCITTTCTCNGIGNR
INQPPDQGVKIITHKECNTIGINGMLFNTNKEGTLAFYTPDDITLNNSVALNPIDISIELNKAKSDLEESKEWIRRSNQ
KLDSIEDKIEEILSKIYHIENEIARIKKLIGEAEPEA
SEQ ID NO: 118 PIV200894
MPISILLIITTMIMASHCQIDITKLQHVGVLVNSPKGMKISQNFETRYLILSLIPKIEDSNSCGDQQIKQYKRLLDRLIIPL
YDGLRLMKDVIVTNQESNENTDPRTERFFGGVIGTIALGVATSAQITAAVALVEAKQARSDIEKLKEAIRDTNKAVQ
SVQSSVGNPIVAIKSVQDYVNKEIVPSIARLGCEAAGLLLGIALTQHYSELTNIFGDNIGSLIEKGIKLQGIASLYRTNITE
IFTTSTVDKYDIYDLLFTESIKVRVIDVDLNDYSITLQVRLPLLTRLLNTQIYKVDSISYNIQNREWYIPLPSHIMTKGAFL
GGADVKECIEAPSSYICPSDPGFVLNHEMESCLSGNISQCPRTTVTSDIVPRYAFVNGGVVANCITTTCTCNGIGNRI
NQPPDQGVKIITHKECNTIGINGMLFNTNKEGTLAFYTPDDITLNNSVALNPIDISIELNKAKSDLEESKEWIRRSNQK
LDSIEDKIEEILSKIYHIENEIARIKKLIGEAEPEA
SEQ ID NO: 119 PIV200895
MPISILLIITTMIMASHCQIDITKLQHVGVLVNSPKGMKISQNFETRYLILSLIPKIEDSNSCGDQQIKQYKRLLDRLIIPL
YDGLRLMKDVIVTNQESNENTDPRTERFFGGVIGTIALGVATSAQITAAVALVEAKQARSDIEKLKEAIRDTNKAVQ
SVQSSVGNPIVAIKSVQDYVNKEIVPCIARLGCEACGLLLGIALTQHYSELTNIFGDNIGSLIEKGIKLQGIASLYRTNITE
IFTTSTVDKYDIYDLLFTESIKVRVIDVDLNDYSITLQVRLPLLTRLLNTQIYKVDSISYNIQNREWYIPLPSHIMTKGAFL
GGADVKECIEAFSSYICPSDPGFVLNHEMESCLSGNISQCPRTTVTSDIVPRYAFVNGGVVANCITTTCTCNGIGNRI
NQPPDQGVKIITHKECNTIGINGMLFNTNKEGTLAFYTPDDITLNNSVALNPIDISIELNKAKSDLEESKEWIRRSNQK
LDSIEDKIEEILSKIYHIENEIARIKKLIGEAEPEA
SEQ ID NO: 120 PIV200896
MPISILLIITTMIMASHCQIDITKLQHVGVLVNSPKGMKISQNFETRYLILSLIPKIEDSNSCGDQQIKQYKRLLDRLIIPL
YDGLRLMKDVIVTNQESNENTDPRTERFFGGVIGTIALGVATSAQITAAVALVEAKQARSDIEKLKEAIRDTNKAVQ
SVQSSVGNPIVAIKSVQDYVNKEIVPSIARLGCEAAGLQLGIALDQHYSELTNIFGDNIGSLIEKGIKLQGIASLYRTNIT
EIFTTSTVDKYDIYDLLFTESIKVRVIDVDLNDYSITLQVRLPLLTRLLNTQIYKVDSISYNIQNREWYIPLPSHIMTKGAF
LGGADVKECIEAPSSYICPSDPGFVLNHEMESCLSGNISQCPRTTVTSDIVPRYAFVNGGVVANCITTTCTCNGIGNR
INQPPDQGVKIITHKECNTIGINGMLFNTNKEGTLAFYTPDDITLNNSVALNPIDISIELNKAKSDLEESKEWIRRSNQ
KLDSIEDKIEEILSKIYHIENEIARIKKLIGEAEPEA
SEQ ID NO: 121 PIV200897
MPISILLIITTMIMASHCQIDITKLQHVGVLVNSPKGMKISQNFETRYLILSLIPKIEDSNSCGDQQIKQYKRLLDRLIIPL
YDGLRLMKDVIVTNQESNENTDPRTERFFGGVIGTIALGVATSAQITAAVALVEAKQARSDIEKLKEAIRDTNKAVQ
SVQSSVGNPIVAIKSVQDYVNKEIVPCIARLGCEACGLQLGIALDQHYSELTNIFGDNIGSLIEKGIKLQGIASLYRTNIT
EIFTTSTVDKYDIYDLLFTESIKVRVIDVDLNDYSITLQVRLPLLTRLLNTQIYKVDSISYNIQNREWYIPLPSHIMTKGAF
LGGADVKECIEAFSSYICPSDPGFVLNHEMESCLSGNISQCPRTTVTSDIVPRYAFVNGGVVANCITTTCTCNGIGNR
INQPPDQGVKIITHKECNTIGINGMLFNTNKEGTLAFYTPDDITLNNSVALNPIDISIELNKAKSDLEESKEWIRRSNQ
KLDSIEDKIEEILSKIYHIENEIARIKKLIGEAEPEA
SEQ ID NO: 122 PIV200898
MPISILLIITTMIMASHCQIDITKLQHVGVLVNSPKGMKISQNFETRYLILSLIPKIEDSNSCGDQQIKQYKRLLDRLIIPL
YDGLRLMKDVIVTNQESNENTDPRTERFFGGVIGTIALGVATSAQITAAVALVEAKQARSDIEKLKEAIRDTNKAVQ
SVQSSVGNPIVAIKSVQDYVNKEIVPCIARLGCEACGLQLGIALTQHYSELTNIFGDNIGSLIEKGIKLQGIASLYRTNIT
EIFTTSTVDKYDIYDLLFTESIKVRVIDVDLNDYSITLQVRLPLLTRLLNTQIYKVDSISYNIQNREWYIPLPSHIMTKGAF
LGGADVKECIEAPSSYICPSDPGFVLNHEMESCLSGNISQCPRTTVTSDIVPRYAFVNGGVVANCITTTCTCNGIGNR
INQPPDQGVKIITHKECNTIGINGMLFNTNKEGTLAFYTPDDITLNNSVALNPIDISIELNKAKSDLEESKEWIRRSNQ
KLDSIEDKIEEILSKIYHIENEIARIKKLIGEAEPEA
SEQ ID NO: 123 PIV200899
MPISILLIITTMIMASHCQIDITKLQHVGVLVNSPKGMKIPQNFETRYLILSLIPKIEDSNSCGDQQIKQYKRLLDRLIIPL
YDGLRLMKDVIVTNQESNENTDPRTERFFGGVIGTIALGVATSAQITAAVALVEAKQARSDIEKLKEAIRDTNKAVQ
SVQSSVGPPIVAIKSVQDYVNKEIVPSIARLGCEAAGLLLGIALTQHYSELTNIFGDNIGSLIEKGIKLQGIASLYRTNITE
IFTTSTVDKYDIYDLLFTESIKVRVIDVDLNDYSITLQVRLPLLTRLLNTQIYKVDSISYNIQNREWYIPLPSHIMTKGAFL
GGADVKECIEAFSSYICPSDPGFVLNHEMESCLSGNISQCPRTTVTSDIVPRYAFVNGGVVANCITTTCTCNGIGNRI
NQPPDQGVKIITHKECNTIGINGMLFNTNKEGTLAFYTPDDITLNNSVALNPIDISIELNKAKSDLEESKEWIRRSNQK
LDSIEDKIEEILSKIYHIENEIARIKKLIGEAEPEA
SEQ ID NO: 124 PIV200900
MPISILLIITTMIMASHCQIDITKLQHVGVLVNSPKGMKIPQNFETRYLILSLIPKIEDSNSCGDQQIKQYKRLLDRLIIPL
YDGLRLMKDVIVTNQESNENTDPRTERFFGGVIGTIALGVATSAQITAAVALVEAKQARSDIEKLKEAIRDTNKAVQ
SVQSSVGPPIVAIKSVQDYVNKEIVPSIARLGCEAAGLQLGIALDQHYSELTNIFGDNIGSLIEKGIKLQGIASLYRTNIT
EIFTTSTVDKYDIYDLLFTESIKVRVIDVDLNDYSITLQVRLPLLTRLLNTQIYKVDSISYNIQNREWYIPLPSHIMTKGAF
LGGADVKECIEAFSSYICPSDPGFVLNHEMESCLSGNISQCPRTTVTSDIVPRYAFVNGGVVANCITTTCTCNGIGNR
INQPPDQGVKIITHKECNTIGINGMLFNTNKEGTLAFYTPDDITLNNSVALNPIDISIELNKAKSDLEESKEWIRRSNQ
KLDSIEDKIEEILSKIYHIENEIARIKKLIGEAEPEA
SEQ ID NO: 125 PIV200901
MPISILLIITTMIMASHCQIDITKLQHVGVLVNSPKGMKIPQNFETRYLILSLIPKIEDSNSCGDQQIKQYKRLLDRLIIPL
YDGLRLMKDVIVTNQESNENTDPRTERFFGGVIGTIALGVATSAQITAAVALVEAKQARSDIEKLKEAIRDTNKAVQ
SVQSSVGPPIVAIKSVQDYVNKEIVPSIARLGCEAAGLQLGIALTQHYSELTNIFGDNIGSLIEKGIKLQGIASLYRTNIT
EIFTTSTVDKYDIYDLLFTESIKVRVIDVDLNDYSITLQVRLPLLTRLLNTQIYKVDSISYNIQNREWYIPLPSHIMTKGAF
LGGADVKECIEAPSSYICPSDPGFVLNHEMESCLSGNISQCPRTTVTSDIVPRYAFVNGGVVANCITTTCTCNGIGNR
INQPPDQGVKIITHKECNTIGINGMLFNTNKEGTLAFYTPDDITLNNSVALNPIDISIELNKAKSDLEESKEWIRRSNQ
KLDSIEDKIEEILSKIYHIENEIARIKKLIGEAEPEA
SEQ ID NO: 126 PIV200902
MPISILLIITTMIMASHCQIDITKLQHVGVLVNSPKGMKIPQNFETRYLILSLIPKIEDSNSCGDQQIKQYKRLLDRLIIPL
YDGLRLMKDVIVTNQESNENTDPRTERFFGGVIGTIALGVATSAQITAAVALVEAKQARSDIEKLKEAIRDTNKAVQ
SVQSSVGPPIVAIKSVQDYVNKEIVPCIARLGCEACGLQLGIALTQHYSELTNIFGDNIGSLIEKGIKLQGIASLYRTNIT
EIFTTSTVDKYDIYDLLFTESIKVRVIDVDLNDYSITLQVRLPLLTRLLNTQIYKVDSISYNIQNREWYIPLPSHIMTKGAF
LGGADVKECIEAFSSYICPSDPGFVLNHEMESCLSGNISQCPRTTVTSDIVPRYAFVNGGVVANCITTTCTCNGIGNR
INQPPDQGVKIITHKECNTIGINGMLFNTNKEGTLAFYTPDDITLNNSVALNPIDISIELNKAKSDLEESKEWIRRSNQ
KLDSIEDKIEEILSKIYHIENEIARIKKLIGEAEPEA
SEQ ID NO: 127 PIV200903
MPISILLIITTMIMASHCQIDITKLQHVGVLVNSPKGMKIPQNFETRYLILSLIPKIEDSNSCGDQQIKQYKRLLDRLIIPL
YDGLRLMKDVIVTNQESNENTDPRTERFFGGVIGTIALGVATSAQITAAVALVEAKQARSDIEKLKEAIRDTNKAVQ
SVQSSVGNPIVAIKSVQDYVNKEIVPSIARLGCEAAGLLLGIALDQHYSELTNIFGDNIGSLIEKGIKLQGIASLYRTNIT
EIFTTSTVDKYDIYDLLFTESIKVRVIDVDLNDYSITLQVRLPLLTRLLNTQIYKVDSISYNIQNREWYIPLPSHIMTKGAF
LGGADVKECIEAFSSYICPSDPGFVLNHEMESCLSGNISQCPRTTVTSDIVPRYAFVNGGVVANCITTTCTCNGIGNR
INQPPDQGVKIITHKECNTIGINGMLFNTNKEGTLAFYTPDDITLNNSVALNPIDISIELNKAKSDLEESKEWIRRSNQ
KLDSIEDKIEEILSKIYHIENEIARIKKLIGEAEPEA
SEQ ID NO: 128 PIV200904
MPISILLIITTMIMASHCQIDITKLQHVGVLVNSPKGMKIPQNFETRYLILSLIPKIEDSNSCGDQQIKQYKRLLDRLIIPL
YDGLRLMKDVIVTNQESNENTDPRTERFFGGVIGTIALGVATSAQITAAVALVEAKQARSDIEKLKEAIRDTNKAVQ
SVQSSVGNPIVAIKSVQDYVNKEIVPSIARLGCEAAGLLLGIALTQHYSELTNIFGDNIGSLIEKGIKLQGIASLYRTNITE
IFTTSTVDKYDIYDLLFTESIKVRVIDVDLNDYSITLQVRLPLLTRLLNTQIYKVDSISYNIQNREWYIPLPSHIMTKGAFL
GGADVKECIEAPSSYICPSDPGFVLNHEMESCLSGNISQCPRTTVTSDIVPRYAFVNGGVVANCITTTCTCNGIGNRI
NQPPDQGVKIITHKECNTIGINGMLFNTNKEGTLAFYTPDDITLNNSVALNPIDISIELNKAKSDLEESKEWIRRSNQK
LDSIEDKIEEILSKIYHIENEIARIKKLIGEAEPEA
SEQ ID NO: 129 PIV200905
MPISILLIITTMIMASHCQIDITKLQHVGVLVNSPKGMKIPQNFETRYLILSLIPKIEDSNSCGDQQIKQYKRLLDRLIIPL
YDGLRLMKDVIVTNQESNENTDPRTERFFGGVIGTIALGVATSAQITAAVALVEAKQARSDIEKLKEAIRDTNKAVQ
SVQSSVGNPIVAIKSVQDYVNKEIVPCIARLGCEACGLLLGIALTQHYSELTNIFGDNIGSLIEKGIKLQGIASLYRTNITE
IFTTSTVDKYDIYDLLFTESIKVRVIDVDLNDYSITLQVRLPLLTRLLNTQIYKVDSISYNIQNREWYIPLPSHIMTKGAFL
GGADVKECIEAFSSYICPSDPGFVLNHEMESCLSGNISQCPRTTVTSDIVPRYAFVNGGVVANCITTTCTCNGIGNRI
NQPPDQGVKIITHKECNTIGINGMLFNTNKEGTLAFYTPDDITLNNSVALNPIDISIELNKAKSDLEESKEWIRRSNQK
LDSIEDKIEEILSKIYHIENEIARIKKLIGEAEPEA
SEQ ID NO: 130 PIV200906
MPISILLIITTMIMASHCQIDITKLQHVGVLVNSPKGMKIPQNFETRYLILSLIPKIEDSNSCGDQQIKQYKRLLDRLIIPL
YDGLRLMKDVIVTNQESNENTDPRTERFFGGVIGTIALGVATSAQITAAVALVEAKQARSDIEKLKEAIRDTNKAVQ
SVQSSVGNPIVAIKSVQDYVNKEIVPSIARLGCEAAGLQLGIALDQHYSELTNIFGDNIGSLIEKGIKLQGIASLYRTNIT
EIFTTSTVDKYDIYDLLFTESIKVRVIDVDLNDYSITLQVRLPLLTRLLNTQIYKVDSISYNIQNREWYIPLPSHIMTKGAF
LGGADVKECIEAPSSYICPSDPGFVLNHEMESCLSGNISQCPRTTVTSDIVPRYAFVNGGVVANCITITCTCNGIGNR
INQPPDQGVKIITHKECNTIGINGMLFNTNKEGTLAFYTPDDITLNNSVALNPIDISIELNKAKSDLEESKEWIRRSNQ
KLDSIEDKIEEILSKIYHIENEIARIKKLIGEAEPEA
SEQ ID NO: 131 PIV200907
MPISILLIITTMIMASHCQIDITKLQHVGVLVNSPKGMKIPQNFETRYLILSLIPKIEDSNSCGDQQIKQYKRLLDRLIIPL
YDGLRLMKDVIVTNQESNENTDPRTERFFGGVIGTIALGVATSAQITAAVALVEAKQARSDIEKLKEAIRDTNKAVQ
SVQSSVGNPIVAIKSVQDYVNKEIVPCIARLGCEACGLQLGIALDQHYSELTNIFGDNIGSLIEKGIKLQGIASLYRTNIT
EIFTTSTVDKYDIYDLLFTESIKVRVIDVDLNDYSITLQVRLPLLTRLLNTQIYKVDSISYNIQNREWYIPLPSHIMTKGAF
LGGADVKECIEAFSSYICPSDPGFVLNHEMESCLSGNISQCPRTTVTSDIVPRYAFVNGGVVANCITTTCTCNGIGNR
INQPPDQGVKIITHKECNTIGINGMLFNTNKEGTLAFYTPDDITLNNSVALNPIDISIELNKAKSDLEESKEWIRRSNQ
KLDSIEDKIEEILSKIYHIENEIARIKKLIGEAEPEA
SEQ ID NO: 132 PIV200908
MPISILLIITTMIMASHCQIDITKLQHVGVLVNSPKGMKIPQNFETRYLILSLIPKIEDSNSCGDQQIKQYKRLLDRLIIPL
YDGLRLMKDVIVTNQESNENTDPRTERFFGGVIGTIALGVATSAQITAAVALVEAKQARSDIEKLKEAIRDTNKAVQ
SVQSSVGNPIVAIKSVQDYVNKEIVPCIARLGCEACGLQLGIALTQHYSELTNIFGDNIGSLIEKGIKLQGIASLYRTNIT
EIFTTSTVDKYDIYDLLFTESIKVRVIDVDLNDYSITLQVRLPLLTRLLNTQIYKVDSISYNIQNREWYIPLPSHIMTKGAF
LGGADVKECIEAPSSYICPSDPGFVLNHEMESCLSGNISQCPRTTVTSDIVPRYAFVNGGVVANCITTTCTCNGIGNR
INQPPDQGVKIITHKECNTIGINGMLFNTNKEGTLAFYTPDDITLNNSVALNPIDISIELNKAKSDLEESKEWIRRSNQ
KLDSIEDKIEEILSKIYHIENEIARIKKLIGEAEPEA
SEQ ID NO: 133 PIV200909
MPISILLIITTMIMASHCQIDITKLQHVGVLVNSPKGMKISQNFETRYLILSLIPKIEDSNSCGDQQIKQYKRLLDRLIIPL
YDGLRLMKDVIVTNQESNENTDPRTERFFGGVIGTIALGVATSAQITAAVALVEAKQARSDIEKLKEAIRDTNKAVQ
SVQSSVGPPIVAIKSVQDYVNKEIVPSIARLGCEAAGLLLGIALDQHYSELTNIFGDNIGSLIEKGIKLQGIASLYRTNITE
IFTTSTVDKYDIYDLLFTESIKVRVIDVDLNDYSITLQVRLPLLTRLLNTQIYKVDSISYNIQNREWYIPLPSHIMTKGAFL
GGADVKECIEAFSSYICPSDPGFVLNHEMESCLSGNISQCPRTTVTSDIVPRYAFVNGGVVANCITTTCTCNGIGNRI
NQPPDQGVKIITHKECNTIGINGMLFNTNKEGTLAFYTPDDITLNNSVALNPIDISIELNKAKSDLEESKEWIRRSNQK
LDSIEDKIEEILSKIYHIENEIARIKKLIGEAEPEA
SEQ ID NO: 134 PIV200910
MPISILLIITTMIMASHCQIDITKLQHVGVLVNSPKGMKISQNFETRYLILSLIPKIEDSNSCGDQQIKQYKRLLDRLIIPL
YDGLRLMKDVIVTNQESNENTDPRTERFFGGVIGTIALGVATSAQITAAVALVEAKQARSDIEKLKEAIRDTNKAVQ
SVQSSVGPPIVAIKSVQDYVNKEIVPSIARLGCEAAGLLLGIALTQHYSELTNIFGDNIGSLIEKGIKLQGIASLYRTNITE
IFTTSTVDKYDIYDLLFTESIKVRVIDVDLNDYSITLQVRLPLLTRLLNTQIYKVDSISYNIQNREWYIPLPSHIMTKGAFL
GGADVKECIEAPSSYICPSDPGFVLNHEMESCLSGNISQCPRTTVTSDIVPRYAFVNGGVVANCITTTCTCNGIGNRI
NQPPDQGVKIITHKECNTIGINGMLFNTNKEGTLAFYTPDDITLNNSVALNPIDISIELNKAKSDLEESKEWIRRSNQK
LDSIEDKIEEILSKIYHIENEIARIKKLIGEAEPEA
SEQ ID NO: 135 PIV200911
MPISILLIITTMIMASHCQIDITKLQHVGVLVNSPKGMKISQNFETRYLILSLIPKIEDSNSCGDQQIKQYKRLLDRLIIPL
YDGLRLMKDVIVTNQESNENTDPRTERFFGGVIGTIALGVATSAQITAAVALVEAKQARSDIEKLKEAIRDTNKAVQ
SVQSSVGPPIVAIKSVQDYVNKEIVPCIARLGCEACGLLLGIALTQHYSELTNIFGDNIGSLIEKGIKLQGIASLYRTNITE
IFTTSTVDKYDIYDLLFTESIKVRVIDVDLNDYSITLQVRLPLLTRLLNTQIYKVDSISYNIQNREWYIPLPSHIMTKGAFL
GGADVKECIEAFSSYICPSDPGFVLNHEMESCLSGNISQCPRTTVTSDIVPRYAFVNGGVVANCITTTCTCNGIGNRI
NQPPDQGVKIITHKECNTIGINGMLFNTNKEGTLAFYTPDDITLNNSVALNPIDISIELNKAKSDLEESKEWIRRSNQK
LDSIEDKIEEILSKIYHIENEIARIKKLIGEAEPEA
SEQ ID NO: 136 PIV200912
MPISILLIITTMIMASHCQIDITKLQHVGVLVNSPKGMKISQNFETRYLILSLIPKIEDSNSCGDQQIKQYKRLLDRLIIPL
YDGLRLMKDVIVTNQESNENTDPRTERFFGGVIGTIALGVATSAQITAAVALVEAKQARSDIEKLKEAIRDTNKAVQ
SVQSSVGPPIVAIKSVQDYVNKEIVPSIARLGCEAAGLQLGIALDQHYSELTNIFGDNIGSLIEKGIKLQGIASLYRTNIT
EIFTTSTVDKYDIYDLLFTESIKVRVIDVDLNDYSITLQVRLPLLTRLLNTQIYKVDSISYNIQNREWYIPLPSHIMTKGAF
LGGADVKECIEAPSSYICPSDPGFVLNHEMESCLSGNISQCPRTTVTSDIVPRYAFVNGGVVANCITTTCTCNGIGNR
INQPPDQGVKIITHKECNTIGINGMLFNTNKEGTLAFYTPDDITLNNSVALNPIDISIELNKAKSDLEESKEWIRRSNQ
KLDSIEDKIEEILSKIYHIENEIARIKKLIGEAEPEA
SEQ ID NO: 137 PIV200913
MPISILLIITTMIMASHCQIDITKLQHVGVLVNSPKGMKISQNFETRYLILSLIPKIEDSNSCGDQQIKQYKRLLDRLIIPL
YDGLRLMKDVIVTNQESNENTDPRTERFFGGVIGTIALGVATSAQITAAVALVEAKQARSDIEKLKEAIRDTNKAVQ
SVQSSVGPPIVAIKSVQDYVNKEIVPCIARLGCEACGLQLGIALDQHYSELTNIFGDNIGSLIEKGIKLQGIASLYRTNIT
EIFTTSTVDKYDIYDLLFTESIKVRVIDVDLNDYSITLQVRLPLLTRLLNTQIYKVDSISYNIQNREWYIPLPSHIMTKGAF
LGGADVKECIEAFSSYICPSDPGFVLNHEMESCLSGNISQCPRTTVTSDIVPRYAFVNGGVVANCITTTCTCNGIGNR
INQPPDQGVKIITHKECNTIGINGMLFNTNKEGTLAFYTPDDITLNNSVALNPIDISIELNKAKSDLEESKEWIRRSNQ
KLDSIEDKIEEILSKIYHIENEIARIKKLIGEAEPEA
SEQ ID NO: 138 PIV200914
MPISILLIITTMIMASHCQIDITKLQHVGVLVNSPKGMKISQNFETRYLILSLIPKIEDSNSCGDQQIKQYKRLLDRLIIPL
YDGLRLMKDVIVTNQESNENTDPRTERFFGGVIGTIALGVATSAQITAAVALVEAKQARSDIEKLKEAIRDTNKAVQ
SVQSSVGPPIVAIKSVQDYVNKEIVPCIARLGCEACGLQLGIALTQHYSELTNIFGDNIGSLIEKGIKLQGIASLYRTNIT
EIFTTSTVDKYDIYDLLFTESIKVRVIDVDLNDYSITLQVRLPLLTRLLNTQIYKVDSISYNIQNREWYIPLPSHIMTKGAF
LGGADVKECIEAPSSYICPSDPGFVLNHEMESCLSGNISQCPRTTVTSDIVPRYAFVNGGVVANCITTTCTCNGIGNR
INQPPDQGVKIITHKECNTIGINGMLFNTNKEGTLAFYTPDDITLNNSVALNPIDISIELNKAKSDLEESKEWIRRSNQ
KLDSIEDKIEEILSKIYHIENEIARIKKLIGEAEPEA
SEQ ID NO: 139 PIV200915
MPISILLIITTMIMASHCQIDITKLQHVGVLVNSPKGMKISQNFETRYLILSLIPKIEDSNSCGDQQIKQYKRLLDRLIIPL
YDGLRLMKDVIVTNQESNENTDPRTERFFGGVIGTIALGVATSAQITAAVALVEAKQARSDIEKLKEAIRDTNKAVQ
SVQSSVGNPIVAIKSVQDYVNKEIVPSIARLGCEAAGLLLGIALDQHYSELTNIFGDNIGSLIEKGIKLQGIASLYRTNIT
EIFTTSTVDKYDIYDLLFTESIKVRVIDVDLNDYSITLQVRLPLLTRLLNTQIYKVDSISYNIQNREWYIPLPSHIMTKGAF
LGGADVKECIEAPSSYICPSDPGFVLNHEMESCLSGNISQCPRTTVTSDIVPRYAFVNGGVVANCITTTCTCNGIGNR
INQPPDQGVKIITHKECNTIGINGMLFNTNKEGTLAFYTPDDITLNNSVALNPIDISIELNKAKSDLEESKEWIRRSNQ
KLDSIEDKIEEILSKIYHIENEIARIKKLIGEAEPEA
SEQ ID NO: 140 PIV200916
MPISILLIITTMIMASHCQIDITKLQHVGVLVNSPKGMKISQNFETRYLILSLIPKIEDSNSCGDQQIKQYKRLLDRLIIPL
YDGLRLMKDVIVTNQESNENTDPRTERFFGGVIGTIALGVATSAQITAAVALVEAKQARSDIEKLKEAIRDTNKAVQ
SVQSSVGNPIVAIKSVQDYVNKEIVPCIARLGCEACGLLLGIALDQHYSELTNIFGDNIGSLIEKGIKLQGIASLYRTNIT
EIFTTSTVDKYDIYDLLFTESIKVRVIDVDLNDYSITLQVRLPLLTRLLNTQIYKVDSISYNIQNREWYIPLPSHIMTKGAF
LGGADVKECIEAFSSYICPSDPGFVLNHEMESCLSGNISQCPRTTVTSDIVPRYAFVNGGVVANCITTTCTCNGIGNR
INQPPDQGVKIITHKECNTIGINGMLFNTNKEGTLAFYTPDDITLNNSVALNPIDISIELNKAKSDLEESKEWIRRSNQ
KLDSIEDKIEEILSKIYHIENEIARIKKLIGEAEPEA
SEQ ID NO: 141 PIV200917
MPISILLIITTMIMASHCQIDITKLQHVGVLVNSPKGMKISQNFETRYLILSLIPKIEDSNSCGDQQIKQYKRLLDRLIIPL
YDGLRLMKDVIVTNQESNENTDPRTERFFGGVIGTIALGVATSAQITAAVALVEAKQARSDIEKLKEAIRDTNKAVQ
SVQSSVGNPIVAIKSVQDYVNKEIVPCIARLGCEACGLLLGIALTQHYSELTNIFGDNIGSLIEKGIKLQGIASLYRTNITE
IFTTSTVDKYDIYDLLFTESIKVRVIDVDLNDYSITLQVRLPLLTRLLNTQIYKVDSISYNIQNREWYIPLPSHIMTKGAFL
GGADVKECIEAPSSYICPSDPGFVLNHEMESCLSGNISQCPRTTVTSDIVPRYAFVNGGVVANCITTTCTCNGIGNRI
NQPPDQGVKIITHKECNTIGINGMLFNTNKEGTLAFYTPDDITLNNSVALNPIDISIELNKAKSDLEESKEWIRRSNQK
LDSIEDKIEEILSKIYHIENEIARIKKLIGEAEPEA
SEQ ID NO: 142 PIV200918
MPISILLIITTMIMASHCQIDITKLQHVGVLVNSPKGMKISQNFETRYLILSLIPKIEDSNSCGDQQIKQYKRLLDRLIIPL
YDGLRLMKDVIVTNQESNENTDPRTERFFGGVIGTIALGVATSAQITAAVALVEAKQARSDIEKLKEAIRDTNKAVQ
SVQSSVGNPIVAIKSVQDYVNKEIVPCIARLGCEACGLQLGIALDQHYSELTNIFGDNIGSLIEKGIKLQGIASLYRTNIT
EIFTTSTVDKYDIYDLLFTESIKVRVIDVDLNDYSITLQVRLPLLTRLLNTQIYKVDSISYNIQNREWYIPLPSHIMTKGAF
LGGADVKECIEAPSSYICPSDPGFVLNHEMESCLSGNISQCPRTTVTSDIVPRYAFVNGGVVANCITTTCTCNGIGNR
INQPPDQGVKIITHKECNTIGINGMLFNTNKEGTLAFYTPDDITLNNSVALNPIDISIELNKAKSDLEESKEWIRRSNQ
KLDSIEDKIEEILSKIYHIENEIARIKKLIGEAEPEA
SEQ ID NO: 143 PIV200919
MPISILLIITTMIMASHCQIDITKLQHVGVLVNSPKGMKIPQNFETRYLILSLIPKIEDSNSCGDQQIKQYKRLLDRLIIPL
YDGLRLMKDVIVTNQESNENTDPRTERFFGGVIGTIALGVATSAQITAAVALVEAKQARSDIEKLKEAIRDTNKAVQ
SVQSSVGPPIVAIKSVQDYVNKEIVPSIARLGCEAAGLLLGIALDQHYSELTNIFGDNIGSLIEKGIKLQGIASLYRTNITE
IFTTSTVDKYDIYDLLFTESIKVRVIDVDLNDYSITLQVRLPLLTRLLNTQIYKVDSISYNIQNREWYIPLPSHIMTKGAFL
GGADVKECIEAFSSYICPSDPGFVLNHEMESCLSGNISQCPRTTVTSDIVPRYAFVNGGVVANCITTTCTCNGIGNRI
NQPPDQGVKIITHKECNTIGINGMLFNTNKEGTLAFYTPDDITLNNSVALNPIDISIELNKAKSDLEESKEWIRRSNQK
LDSIEDKIEEILSKIYHIENEIARIKKLIGEAEPEA
SEQ ID NO: 144 PIV200920
MPISILLIITTMIMASHCQIDITKLQHVGVLVNSPKGMKIPQNFETRYLILSLIPKIEDSNSCGDQQIKQYKRLLDRLIIPL
YDGLRLMKDVIVTNQESNENTDPRTERFFGGVIGTIALGVATSAQITAAVALVEAKQARSDIEKLKEAIRDTNKAVQ
SVQSSVGPPIVAIKSVQDYVNKEIVPSIARLGCEAAGLLLGIALTQHYSELTNIFGDNIGSLIEKGIKLQGIASLYRTNITE
IFTTSTVDKYDIYDLLFTESIKVRVIDVDLNDYSITLQVRLPLLTRLLNTQIYKVDSISYNIQNREWYIPLPSHIMTKGAFL
GGADVKECIEAPSSYICPSDPGFVLNHEMESCLSGNISQCPRTTVTSDIVPRYAFVNGGVVANCITTTCTCNGIGNRI
NQPPDQGVKIITHKECNTIGINGMLFNTNKEGTLAFYTPDDITLNNSVALNPIDISIELNKAKSDLEESKEWIRRSNQK
LDSIEDKIEEILSKIYHIENEIARIKKLIGEAEPEA
SEQ ID NO: 145 PIV200921
MPISILLIITTMIMASHCQIDITKLQHVGVLVNSPKGMKIPQNFETRYLILSLIPKIEDSNSCGDQQIKQYKRLLDRLIIPL
YDGLRLMKDVIVTNQESNENTDPRTERFFGGVIGTIALGVATSAQITAAVALVEAKQARSDIEKLKEAIRDTNKAVQ
SVQSSVGPPIVAIKSVQDYVNKEIVPCIARLGCEACGLLLGIALTQHYSELTNIFGDNIGSLIEKGIKLQGIASLYRTNITE
IFTTSTVDKYDIYDLLFTESIKVRVIDVDLNDYSITLQVRLPLLTRLLNTQIYKVDSISYNIQNREWYIPLPSHIMTKGAFL
GGADVKECIEAFSSYICPSDPGFVLNHEMESCLSGNISQCPRTTVTSDIVPRYAFVNGGVVANCITTTCTCNGIGNRI
NQPPDQGVKIITHKECNTIGINGMLFNTNKEGTLAFYTPDDITLNNSVALNPIDISIELNKAKSDLEESKEWIRRSNQK
LDSIEDKIEEILSKIYHIENEIARIKKLIGEAEPEA
SEQ ID NO: 146 PIV200922
MPISILLIITTMIMASHCQIDITKLQHVGVLVNSPKGMKIPQNFETRYLILSLIPKIEDSNSCGDQQIKQYKRLLDRLIIPL
YDGLRLMKDVIVTNQESNENTDPRTERFFGGVIGTIALGVATSAQITAAVALVEAKQARSDIEKLKEAIRDTNKAVQ
SVQSSVGPPIVAIKSVQDYVNKEIVPCIARLGCEACGLQLGIALTQHYSELTNIFGDNIGSLIEKGIKLQGIASLYRTNIT
EIFTTSTVDKYDIYDLLFTESIKVRVIDVDLNDYSITLQVRLPLLTRLLNTQIYKVDSISYNIQNREWYIPLPSHIMTKGAF
LGGADVKECIEAPSSYICPSDPGFVLNHEMESCLSGNISQCPRTTVTSDIVPRYAFVNGGVVANCITTTCTCNGIGNR
INQPPDQGVKIITHKECNTIGINGMLFNTNKEGTLAFYTPDDITLNNSVALNPIDISIELNKAKSDLEESKEWIRRSNQ
KLDSIEDKIEEILSKIYHIENEIARIKKLIGEAEPEA
SEQ ID NO: 147 PIV200923
MPISILLIITTMIMASHCQIDITKLQHVGVLVNSPKGMKIPQNFETRYLILSLIPKIEDSNSCGDQQIKQYKRLLDRLIIPL
YDGLRLMKDVIVTNQESNENTDPRTERFFGGVIGTIALGVATSAQITAAVALVEAKQARSDIEKLKEAIRDTNKAVQ
SVQSSVGPPIVAIKSVQDYVNKEIVPSIARLGCEAAGLQLGIALDQHYSELTNIFGDNIGSLIEKGIKLQGIASLYRTNIT
EIFTTSTVDKYDIYDLLFTESIKVRVIDVDLNDYSITLQVRLPLLTRLLNTQIYKVDSISYNIQNREWYIPLPSHIMTKGAF
LGGADVKECIEAPSSYICPSDPGFVLNHEMESCLSGNISQCPRTTVTSDIVPRYAFVNGGVVANCITTTCTCNGIGNR
INQPPDQGVKIITHKECNTIGINGMLFNTNKEGTLAFYTPDDITLNNSVALNPIDISIELNKAKSDLEESKEWIRRSNQ
KLDSIEDKIEEILSKIYHIENEIARIKKLIGEAEPEA
SEQ ID NO: 148 PIV200924
MPISILLIITTMIMASHCQIDITKLQHVGVLVNSPKGMKIPQNFETRYLILSLIPKIEDSNSCGDQQIKQYKRLLDRLIIPL
YDGLRLMKDVIVTNQESNENTDPRTERFFGGVIGTIALGVATSAQITAAVALVEAKQARSDIEKLKEAIRDTNKAVQ
SVQSSVGNPIVAIKSVQDYVNKEIVPSIARLGCEAAGLLLGIALDQHYSELTNIFGDNIGSLIEKGIKLQGIASLYRTNIT
EIFTTSTVDKYDIYDLLFTESIKVRVIDVDLNDYSITLQVRLPLLTRLLNTQIYKVDSISYNIQNREWYIPLPSHIMTKGAF
LGGADVKECIEAPSSYICPSDPGFVLNHEMESCLSGNISQCPRTTVTSDIVPRYAFVNGGVVANCITTTCTCNGIGNR
INQPPDQGVKIITHKECNTIGINGMLFNTNKEGTLAFYTPDDITLNNSVALNPIDISIELNKAKSDLEESKEWIRRSNQ
KLDSIEDKIEEILSKIYHIENEIARIKKLIGEAEPEA
SEQ ID NO: 149 PIV200925
MPISILLIITTMIMASHCQIDITKLQHVGVLVNSPKGMKIPQNFETRYLILSLIPKIEDSNSCGDQQIKQYKRLLDRLIIPL
YDGLRLMKDVIVTNQESNENTDPRTERFFGGVIGTIALGVATSAQITAAVALVEAKQARSDIEKLKEAIRDTNKAVQ
SVQSSVGNPIVAIKSVQDYVNKEIVPCIARLGCEACGLLLGIALDQHYSELTNIFGDNIGSLIEKGIKLQGIASLYRTNIT
EIFTTSTVDKYDIYDLLFTESIKVRVIDVDLNDYSITLQVRLPLLTRLLNTQIYKVDSISYNIQNREWYIPLPSHIMTKGAF
LGGADVKECIEAFSSYICPSDPGFVLNHEMESCLSGNISQCPRTTVTSDIVPRYAFVNGGVVANCITTTCTCNGIGNR
INQPPDQGVKIITHKECNTIGINGMLFNTNKEGTLAFYTPDDITLNNSVALNPIDISIELNKAKSDLEESKEWIRRSNQ
KLDSIEDKIEEILSKIYHIENEIARIKKLIGEAEPEA
SEQ ID NO: 150 PIV200926
MPISILLIITTMIMASHCQIDITKLQHVGVLVNSPKGMKIPQNFETRYLILSLIPKIEDSNSCGDQQIKQYKRLLDRLIIPL
YDGLRLMKDVIVTNQESNENTDPRTERFFGGVIGTIALGVATSAQITAAVALVEAKQARSDIEKLKEAIRDTNKAVQ
SVQSSVGNPIVAIKSVQDYVNKEIVPCIARLGCEACGLLLGIALTQHYSELTNIFGDNIGSLIEKGIKLQGIASLYRTNITE
IFTTSTVDKYDIYDLLFTESIKVRVIDVDLNDYSITLQVRLPLLTRLLNTQIYKVDSISYNIQNREWYIPLPSHIMTKGAFL
GGADVKECIEAPSSYICPSDPGFVLNHEMESCLSGNISQCPRTTVTSDIVPRYAFVNGGVVANCITTTCTCNGIGNRI
NQPPDQGVKIITHKECNTIGINGMLFNTNKEGTLAFYTPDDITLNNSVALNPIDISIELNKAKSDLEESKEWIRRSNQK
LDSIEDKIEEILSKIYHIENEIARIKKLIGEAEPEA
SEQ ID NO: 151 PIV200927
MPISILLIITTMIMASHCQIDITKLQHVGVLVNSPKGMKIPQNFETRYLILSLIPKIEDSNSCGDQQIKQYKRLLDRLIIPL
YDGLRLMKDVIVTNQESNENTDPRTERFFGGVIGTIALGVATSAQITAAVALVEAKQARSDIEKLKEAIRDTNKAVQ
SVQSSVGNPIVAIKSVQDYVNKEIVPCIARLGCEACGLQLGIALDQHYSELTNIFGDNIGSLIEKGIKLQGIASLYRTNIT
EIFTTSTVDKYDIYDLLFTESIKVRVIDVDLNDYSITLQVRLPLLTRLLNTQIYKVDSISYNIQNREWYIPLPSHIMTKGAF
LGGADVKECIEAPSSYICPSDPGFVLNHEMESCLSGNISQCPRTTVTSDIVPRYAFVNGGVVANCITTTCTCNGIGNR
INQPPDQGVKIITHKECNTIGINGMLFNTNKEGTLAFYTPDDITLNNSVALNPIDISIELNKAKSDLEESKEWIRRSNQ
KLDSIEDKIEEILSKIYHIENEIARIKKLIGEAEPEA
SEQ ID NO: 152 PIV200928
MPISILLIITTMIMASHCQIDITKLQHVGVLVNSPKGMKISQNFETRYLILSLIPKIEDSNSCGDQQIKQYKRLLDRLIIPL
YDGLRLMKDVIVTNQESNENTDPRTERFFGGVIGTIALGVATSAQITAAVALVEAKQARSDIEKLKEAIRDTNKAVQ
SVQSSVGPPIVAIKSVQDYVNKEIVPSIARLGCEAAGLLLGIALDQHYSELTNIFGDNIGSLIEKGIKLQGIASLYRTNITE
IFTTSTVDKYDIYDLLFTESIKVRVIDVDLNDYSITLQVRLPLLTRLLNTQIYKVDSISYNIQNREWYIPLPSHIMTKGAFL
GGADVKECIEAPSSYICPSDPGFVLNHEMESCLSGNISQCPRTTVTSDIVPRYAFVNGGVVANCITTTCTCNGIGNRI
NQPPDQGVKIITHKECNTIGINGMLFNTNKEGTLAFYTPDDITLNNSVALNPIDISIELNKAKSDLEESKEWIRRSNQK
LDSIEDKIEEILSKIYHIENEIARIKKLIGEAEPEA
SEQ ID NO: 153 PIV200929
MPISILLIITTMIMASHCQIDITKLQHVGVLVNSPKGMKISQNFETRYLILSLIPKIEDSNSCGDQQIKQYKRLLDRLIIPL
YDGLRLMKDVIVTNQESNENTDPRTERFFGGVIGTIALGVATSAQITAAVALVEAKQARSDIEKLKEAIRDTNKAVQ
SVQSSVGPPIVAIKSVQDYVNKEIVPCIARLGCEACGLLLGIALDQHYSELTNIFGDNIGSLIEKGIKLQGIASLYRTNITE
IFTTSTVDKYDIYDLLFTESIKVRVIDVDLNDYSITLQVRLPLLTRLLNTQIYKVDSISYNIQNREWYIPLPSHIMTKGAFL
GGADVKECIEAFSSYICPSDPGFVLNHEMESCLSGNISQCPRTTVTSDIVPRYAFVNGGVVANCITTTCTCNGIGNRI
NQPPDQGVKIITHKECNTIGINGMLFNTNKEGTLAFYTPDDITLNNSVALNPIDISIELNKAKSDLEESKEWIRRSNQK
LDSIEDKIEEILSKIYHIENEIARIKKLIGEAEPEA
SEQ ID NO: 154 PIV200930
MPISILLIITTMIMASHCQIDITKLQHVGVLVNSPKGMKISQNFETRYLILSLIPKIEDSNSCGDQQIKQYKRLLDRLIIPL
YDGLRLMKDVIVTNQESNENTDPRTERFFGGVIGTIALGVATSAQITAAVALVEAKQARSDIEKLKEAIRDTNKAVQ
SVQSSVGPPIVAIKSVQDYVNKEIVPCIARLGCEACGLLLGIALTQHYSELTNIFGDNIGSLIEKGIKLQGIASLYRTNITE
IFTTSTVDKYDIYDLLFTESIKVRVIDVDLNDYSITLQVRLPLLTRLLNTQIYKVDSISYNIQNREWYIPLPSHIMTKGAFL
GGADVKECIEAPSSYICPSDPGFVLNHEMESCLSGNISQCPRTTVTSDIVPRYAFVNGGVVANCITTTCTCNGIGNRI
NQPPDQGVKIITHKECNTIGINGMLFNTNKEGTLAFYTPDDITLNNSVALNPIDISIELNKAKSDLEESKEWIRRSNQK
LDSIEDKIEEILSKIYHIENEIARIKKLIGEAEPEA
SEQ ID NO: 155 PIV200931
MPISILLIITTMIMASHCQIDITKLQHVGVLVNSPKGMKISQNFETRYLILSLIPKIEDSNSCGDQQIKQYKRLLDRLIIPL
YDGLRLMKDVIVTNQESNENTDPRTERFFGGVIGTIALGVATSAQITAAVALVEAKQARSDIEKLKEAIRDTNKAVQ
SVQSSVGPPIVAIKSVQDYVNKEIVPCIARLGCEACGLQLGIALDQHYSELTNIFGDNIGSLIEKGIKLQGIASLYRTNIT
EIFTTSTVDKYDIYDLLFTESIKVRVIDVDLNDYSITLQVRLPLLTRLLNTQIYKVDSISYNIQNREWYIPLPSHIMTKGAF
LGGADVKECIEAPSSYICPSDPGFVLNHEMESCLSGNISQCPRTTVTSDIVPRYAFVNGGVVANCITTTCTCNGIGNR
INQPPDQGVKIITHKECNTIGINGMLFNTNKEGTLAFYTPDDITLNNSVALNPIDISIELNKAKSDLEESKEWIRRSNQ
KLDSIEDKIEEILSKIYHIENEIARIKKLIGEAEPEA
SEQ ID NO: 156 PIV200932
MPISILLIITTMIMASHCQIDITKLQHVGVLVNSPKGMKISQNFETRYLILSLIPKIEDSNSCGDQQIKQYKRLLDRLIIPL
YDGLRLMKDVIVTNQESNENTDPRTERFFGGVIGTIALGVATSAQITAAVALVEAKQARSDIEKLKEAIRDTNKAVQ
SVQSSVGNPIVAIKSVQDYVNKEIVPCIARLGCEACGLLLGIALDQHYSELTNIFGDNIGSLIEKGIKLQGIASLYRTNIT
EIFTTSTVDKYDIYDLLFTESIKVRVIDVDLNDYSITLQVRLPLLTRLLNTQIYKVDSISYNIQNREWYIPLPSHIMTKGAF
LGGADVKECIEAPSSYICPSDPGFVLNHEMESCLSGNISQCPRTTVTSDIVPRYAFVNGGVVANCITTTCTCNGIGNR
INQPPDQGVKIITHKECNTIGINGMLFNTNKEGTLAFYTPDDITLNNSVALNPIDISIELNKAKSDLEESKEWIRRSNQ
KLDSIEDKIEEILSKIYHIENEIARIKKLIGEAEPEA
SEQ ID NO: 157 PIV200933
MPISILLIITTMIMASHCQIDITKLQHVGVLVNSPKGMKIPQNFETRYLILSLIPKIEDSNSCGDQQIKQYKRLLDRLIIPL
YDGLRLMKDVIVTNQESNENTDPRTERFFGGVIGTIALGVATSAQITAAVALVEAKQARSDIEKLKEAIRDTNKAVQ
SVQSSVGPPIVAIKSVQDYVNKEIVPCIARLGCEACGLQLGIALDQHYSELTNIFGDNIGSLIEKGIKLQGIASLYRTNIT
EIFTTSTVDKYDIYDLLFTESIKVRVIDVDLNDYSITLQVRLPLLTRLLNTQIYKVDSISYNIQNREWYIPLPSHIMTKGAF
LGGADVKECIEAFSSYICPSDPGFVLNHEMESCLSGNISQCPRTTVTSDIVPRYAFVNGGVVANCITTTCTCNGIGNR
INQPPDQGVKIITHKECNTIGINGMLFNTNKEGTLAFYTPDDITLNNSVALNPIDISIELNKAKSDLEESKEWIRRSNQ
KLDSIEDKIEEILSKIYHIENEIARIKKLIGEAEPEA
SEQ ID NO: 158 PIV200934
MPISILLIITTMIMASHCQIDITKLQHVGVLVNSPKGMKIPQNFETRYLILSLIPKIEDSNSCGDQQIKQYKRLLDRLIIPL
YDGLRLMKDVIVTNQESNENTDPRTERFFGGVIGTIALGVATSAQITAAVALVEAKQARSDIEKLKEAIRDTNKAVQ
SVQSSVGPPIVAIKSVQDYVNKEIVPSIARLGCEAAGLLLGIALDQHYSELTNIFGDNIGSLIEKGIKLQGIASLYRTNITE
IFTTSTVDKYDIYDLLFTESIKVRVIDVDLNDYSITLQVRLPLLTRLLNTQIYKVDSISYNIQNREWYIPLPSHIMTKGAFL
GGADVKECIEAPSSYICPSDPGFVLNHEMESCLSGNISQCPRTTVTSDIVPRYAFVNGGVVANCITTTCTCNGIGNRI
NQPPDQGVKIITHKECNTIGINGMLFNTNKEGTLAFYTPDDITLNNSVALNPIDISIELNKAKSDLEESKEWIRRSNQK
LDSIEDKIEEILSKIYHIENEIARIKKLIGEAEPEA
SEQ ID NO: 159 PIV200935
MPISILLIITTMIMASHCQIDITKLQHVGVLVNSPKGMKIPQNFETRYLILSLIPKIEDSNSCGDQQIKQYKRLLDRLIIPL
YDGLRLMKDVIVTNQESNENTDPRTERFFGGVIGTIALGVATSAQITAAVALVEAKQARSDIEKLKEAIRDTNKAVQ
SVQSSVGPPIVAIKSVQDYVNKEIVPCIARLGCEACGLLLGIALDQHYSELTNIFGDNIGSLIEKGIKLQGIASLYRTNITE
IFTTSTVDKYDIYDLLFTESIKVRVIDVDLNDYSITLQVRLPLLTRLLNTQIYKVDSISYNIQNREWYIPLPSHIMTKGAFL
GGADVKECIEAFSSYICPSDPGFVLNHEMESCLSGNISQCPRTTVTSDIVPRYAFVNGGVVANCITTTCTCNGIGNRI
NQPPDQGVKIITHKECNTIGINGMLFNTNKEGTLAFYTPDDITLNNSVALNPIDISIELNKAKSDLEESKEWIRRSNQK
LDSIEDKIEEILSKIYHIENEIARIKKLIGEAEPEA
SEQ ID NO: 160 PIV200936
MPISILLIITTMIMASHCQIDITKLQHVGVLVNSPKGMKIPQNFETRYLILSLIPKIEDSNSCGDQQIKQYKRL
LDRLIIPLYDGLRLMKDVIVTNQESNENTDPRTERFFGGVIGTIALGVATSAQITAAVALVEAKQARSDIEKLKEAIRD
TNKAVQSVQSSVGPPIVAIKSVQDYVNKEIVPCIARLGCEACGLLLGIALTQHYSELTNIFGDNIGSLIEKGIKLQGIASL
YRTNITEIFTTSTVDKYDIYDLLFTESIKVRVIDVDLNDYSITLQVRLPLLTRLLNTQIYKVDSISYNIQNREWYIPLPSHI
MTKGAFLGGADVKECIEAPSSYICPSDPGFVLNHEMESCLSGNISQCPRTTVTSDIVPRYAFVNGGVVANCITTTCT
CNGIGNRINQPPDQGVKIITHKECNTIGINGMLFNTNKEGTLAFYTPDDITLNNSVALNPIDISIELNKAKSDLEESKE
WIRRSNQKLDSIEDKIEEILSKIYHIENEIARIKKLIGEAEPEA
SEQ ID NO: 161 PIV200937
MPISILLIITTMIMASHCQIDITKLQHVGVLVNSPKGMKIPQNFETRYLILSLIPKIEDSNSCGDQQIKQYKRLLDRLIIPL
YDGLRLMKDVIVTNQESNENTDPRTERFFGGVIGTIALGVATSAQITAAVALVEAKQARSDIEKLKEAIRDTNKAVQ
SVQSSVGPPIVAIKSVQDYVNKEIVPCIARLGCEACGLQLGIALDQHYSELTNIFGDNIGSLIEKGIKLQGIASLYRTNIT
EIFTTSTVDKYDIYDLLFTESIKVRVIDVDLNDYSITLQVRLPLLTRLLNTQIYKVDSISYNIQNREWYIPLPSHIMTKGAF
LGGADVKECIEAPSSYICPSDPGFVLNHEMESCLSGNISQCPRTTVTSDIVPRYAFVNGGVVANCITTTCTCNGIGNR
INQPPDQGVKIITHKECNTIGINGMLFNTNKEGTLAFYTPDDITLNNSVALNPIDISIELNKAKSDLEESKEWIRRSNQ
KLDSIEDKIEEILSKIYHIENEIARIKKLIGEAEPEA
SEQ ID NO: 162 PIV200938
MPISILLIITTMIMASHCQIDITKLQHVGVLVNSPKGMKIPQNFETRYLILSLIPKIEDSNSCGDQQIKQYKRLLDRLIIPL
YDGLRLMKDVIVTNQESNENTDPRTERFFGGVIGTIALGVATSAQITAAVALVEAKQARSDIEKLKEAIRDTNKAVQ
SVQSSVGNPIVAIKSVQDYVNKEIVPCIARLGCEACGLLLGIALDQHYSELTNIFGDNIGSLIEKGIKLQGIASLYRTNIT
EIFTTSTVDKYDIYDLLFTESIKVRVIDVDLNDYSITLQVRLPLLTRLLNTQIYKVDSISYNIQNREWYIPLPSHIMTKGAF
LGGADVKECIEAPSSYICPSDPGFVLNHEMESCLSGNISQCPRTTVTSDIVPRYAFVNGGVVANCITTTCTCNGIGNR
INQPPDQGVKIITHKECNTIGINGMLFNTNKEGTLAFYTPDDITLNNSVALNPIDISIELNKAKSDLEESKEWIRRSNQ
KLDSIEDKIEEILSKIYHIENEIARIKKLIGEAEPEA
SEQ ID NO: 163 PIV200939
MPISILLIITTMIMASHCQIDITKLQHVGVLVNSPKGMKISQNFETRYLILSLIPKIEDSNSCGDQQIKQYKRLLDRLIIPL
YDGLRLMKDVIVTNQESNENTDPRTERFFGGVIGTIALGVATSAQITAAVALVEAKQARSDIEKLKEAIRDTNKAVQ
SVQSSVGPPIVAIKSVQDYVNKEIVPCIARLGCEACGLLLGIALDQHYSELTNIFGDNIGSLIEKGIKLQGIASLYRTNITE
IFTTSTVDKYDIYDLLFTESIKVRVIDVDLNDYSITLQVRLPLLTRLLNTQIYKVDSISYNIQNREWYIPLPSHIMTKGAFL
GGADVKECIEAPSSYICPSDPGFVLNHEMESCLSGNISQCPRTTVTSDIVPRYAFVNGGVVANCITTTCTCNGIGNRI
NQPPDQGVKIITHKECNTIGINGMLFNTNKEGTLAFYTPDDITLNNSVALNPIDISIELNKAKSDLEESKEWIRRSNQK
LDSIEDKIEEILSKIYHIENEIARIKKLIGEAEPEA
SEQ ID NO: 164 PIV200940
MPISILLIITTMIMASHCQIDITKLQHVGVLVNSPKGMKIPQNFETRYLILSLIPKIEDSNSCGDQQIKQYKRLLDRLIIPL
YDGLRLMKDVIVTNQESNENTDPRTERFFGGVIGTIALGVATSAQITAAVALVEAKQARSDIEKLKEAIRDTNKAVQ
SVQSSVGPPIVAIKSVQDYVNKEIVPCIARLGCEACGLLLGIALDQHYSELTNIFGDNIGSLIEKGIKLQGIASLYRTNITE
IFTTSTVDKYDIYDLLFTESIKVRVIDVDLNDYSITLQVRLPLLTRLLNTQIYKVDSISYNIQNREWYIPLPSHIMTKGAFL
GGADVKECIEAPSSYICPSDPGFVLNHEMESCLSGNISQCPRTTVTSDIVPRYAFVNGGVVANCITTTCTCNGIGNRI
NQPPDQGVKIITHKECNTIGINGMLFNTNKEGTLAFYTPDDITLNNSVALNPIDISIELNKAKSDLEESKEWIRRSNQK
LDSIEDKIEEILSKIYHIENEIARIKKLIGEAEPEA
SEQ ID NO: 165 PIV200941
MPISILLIITTMIMASHCQIDITKLQHVGVLVNSPKGMKISQNFETRYLILSLIPKIEDSNSCGDQQIKQYKRLLDRLIIPL
YDGLRLMKDVIVTNQESNENTDPRTERFFGGVIGTIALGVATSAQITAAVALVEAKQARSDIEKLKEAIRDTNKAVQ
SVQSSVGNPIVAIKSVQDYVNKEIVPSIARLGCEAAGLQLGIALTQHYSELTNIFGDNIGSLIEKGIKLQGIASLYRTNIT
EIFTTSTVDKYDIYDLLFTESIKVRVIDVDLNDYSITLQVRLPLLTRLLNTQIYKVDSISYNIQNREWYIPLPSHIMTKGAF
LGGADVKECIEAFSSYICPSDPGFVLNHEMESCLSGNISQCPRTTVTSDIVPRYAFVNGGVVANCITTTCTCNGIGNR
INQPPDQGVKIITHKECNTIGINGMLFNTNKEGTLAFYTPDDITLNNSVALNPIDISIELNKAKSDLEESKEWIRRSNQ
KLDSIGSGEPEA
SEQ ID NO: 166 PIV200943
MPISILLIITTMIMASHCQIDITKLQHVGVLVNSPKGMKISQNFETRYLILSLIPKIEDSNSCGDQQIKQYKRLLDRLIIPL
YDGLRLMKDVIVTNQESNENTDPRTERFFGGVIGTIALGVATSAQITAAVALVEAKQARSDIEKLKEAIRDTNKAVQ
SVQSSVGNPIVAIKSVQDYVNKEIVPSIARLGCEAAGLQLGIALTQHYSELTNIFGDNIGSLIEKGIKLQGIASLYRTNIT
EIFTTSTVDKYDIYDLLFTESIKVRVIDVDLNDYSITLQVRLPLLTRLLNTQIYKVDSISYNIQNREWYIPLPSHIMTKGAF
LGGADVKECIEAFSSYICPSDPGFVLNHEMESCLSGNISQCPRTTVTSDIVPRYAFVNGGVVANCITTTCTCNGIGNR
INQPPDQGVKIITHKECNTIGINGMLFNTNKEGTLAFYTPDDITLNNSVALNPIDISIELNKAKSDLEEVKEWIRRSNQ
KLDSIGSGEPEA
SEQ ID NO: 167 PIV200945
MPISILLIITTMIMASHCQIDITKLQHVGVLVNSPKGMKISQNFETRYLILSLIPKIEDSNSCGDQQIKQYKRLLDRLIIPL
YDGLRLMKDVIVTNQESNENTDPRTERFFGGVIGTIALGVATSAQITAAVALVEAKQARSDIEKLKEAIRDTNKAVQ
SVQSSVGNPIVAIKSVQDYVNKEIVPSIARLGCEAAGLQLGIALTQHYSELTNIFGDNIGSLIEKGIKLQGIASLYRTNIT
EIFTTSTVDKYDIYDLLFTESIKVRVIDVDLNDYSITLQVRLPLLTRLLNTQIYKVDSISYNIQNREWYIPLPSHIMTKGAF
LGGADVKECIEAFSSYICPSDPGFVLNHEMESCLSGNISQCPRTTVTSDIVPRYAFVNGGVVANCITTTCTCNGIGNR
INQPPDQGVKIITHKECNTIGINGMLFNTNKEGTLAFYTPDDITLNNSVALNPIDISIELNKAKSDLEESKEWIRRVNQ
KLDSIGSGEPEA
SEQ ID NO: 168 PIV200947
MPISILLIITTMIMASHCQIDITKLQHVGVLVNSPKGMKISQNFETRYLILSLIPKIEDSNSCGDQQIKQYKRLLDRLIIPL
YDGLRLMKDVIVTNQESNENTDPRTERFFGGVIGTIALGVATSAQITAAVALVEAKQARSDIEKLKEAIRDTNKAVQ
SVQSSVGNPIVAIKSVQDYVNKEIVPSIARLGCEAAGLQLGIALTQHYSELTNIFGDNIGSLIEKGIKLQGIASLYRTNIT
EIFTTSTVDKYDIYDLLFTESIKVRVIDVDLNDYSITLQVRLPLLTRLLNTQIYKVDSISYNIQNREWYIPLPSHIMTKGAF
LGGADVKECIEAFSSYICPSDPGFVLNHEMESCLSGNISQCPRTTVTSDIVPRYAFVNGGVVANCITTTCTCNGIGNR
INQPPDQGVKIITHKECNTIGINGMLFNTNKEGTLAFYTPDDITLNNSVALNPIDISIELNKVKSDLEEVKEWIRRSNQ
KLDSIGSGEPEA
SEQ ID NO: 169 PIV200949
MPISILLIITTMIMASHCQIDITKLQHVGVLVNSPKGMKISQNFETRYLILSLIPKIEDSNSCGDQQIKQYKRLLDRLIIPL
YDGLRLMKDVIVTNQESNENTDPRTERFFGGVIGTIALGVATSAQITAAVALVEAKQARSDIEKLKEAIRDTNKAVQ
SVQSSVGNPIVAIKSVQDYVNKEIVPSIARLGCEAAGLQLGIALTQHYSELTNIFGDNIGSLIEKGIKLQGIASLYRTNIT
EIFTTSTVDKYDIYDLLFTESIKVRVIDVDLNDYSITLQVRLPLLTRLLNTQIYKVDSISYNIQNREWYIPLPSHIMTKGAF
LGGADVKECIEAFSSYICPSDPGFVLNHEMESCLSGNISQCPRTTVTSDIVPRYAFVNGGVVANCITTTCTCNGIGNR
INQPPDQGVKIITHKECNTIGINGMLFNTNKEGTLAFYTPDDITLNNSVALNPIDISIELNKVKSDLEESKEWIRRVNQ
KLDSIGSGEPEA
SEQ ID NO: 170 PIV200950
MPISILLIITTMIMASHCQIDITKLQHVGVLVNSPKGMKISQNFETRYLILSLIPKIEDSNSCGDQQIKQYKRLLDRLIIPL
YDGLRLMKDVIVTNQESNENTDPRTERFFGGVIGTIALGVATSAQITAAVALVEAKQARSDIEKLKEAIRDTNKAVQ
SVQSSVGNPIVAIKSVQDYVNKEIVPSIARLGCEAAGLQLGIALTQHYSELTNIFGDNIGSLIEKGIKLQGIASLYRTNIT
EIFTTSTVDKYDIYDLLFTESIKVRVIDVDLNDYSITLQVRLPLLTRLLNTQIYKVDSISYNIQNREWYIPLPSHIMTKGAF
LGGADVKECIEAFSSYICPSDPGFVLNHEMESCLSGNISQCPRTTVTSDIVPRYAFVNGGVVANCITTTCTCNGIGNR
INQPPDQGVKIITHKECNTIGINGMLFNTNKEGTLAFYTPDDITLNNSVALNPIDISIELNKAKSDLEEVKEWLRRSNQ
KLDSIGSGEPEA
SEQ ID NO: 171 PIV200951
MPISILLIITTMIMASHCQIDITKLQHVGVLVNSPKGMKISQNFETRYLILSLIPKIEDSNSCGDQQIKQYKRLLDRLIIPL
YDGLRLMKDVIVTNQESNENTDPRTERFFGGVIGTIALGVATSAQITAAVALVEAKQARSDIEKLKEAIRDTNKAVQ
SVQSSVGNPIVAIKSVQDYVNKEIVPSIARLGCEAAGLQLGIALTQHYSELTNIFGDNIGSLIEKGIKLQGIASLYRTNIT
EIFTTSTVDKYDIYDLLFTESIKVRVIDVDLNDYSITLQVRLPLLTRLLNTQIYKVDSISYNIQNREWYIPLPSHIMTKGAF
LGGADVKECIEAFSSYICPSDPGFVLNHEMESCLSGNISQCPRTTVTSDIVPRYAFVNGGVVANCITTTCTCNGIGNR
INQPPDQGVKIITHKECNTIGINGMLFNTNKEGTLAFYTPDDITLNNSVALNPIDISIELNKAKSDLEEVKEWIRRVNQ
KLDSIGSGEPEA
SEQ ID NO: 172 PIV200952
MPISILLIITTMIMASHCQIDITKLQHVGVLVNSPKGMKISQNFETRYLILSLIPKIEDSNSCGDQQIKQYKRLLDRLIIPL
YDGLRLMKDVIVTNQESNENTDPRTERFFGGVIGTIALGVATSAQITAAVALVEAKQARSDIEKLKEAIRDTNKAVQ
SVQSSVGNPIVAIKSVQDYVNKEIVPSIARLGCEAAGLQLGIALTQHYSELTNIFGDNIGSLIEKGIKLQGIASLYRTNIT
EIFTTSTVDKYDIYDLLFTESIKVRVIDVDLNDYSITLQVRLPLLTRLLNTQIYKVDSISYNIQNREWYIPLPSHIMTKGAF
LGGADVKECIEAFSSYICPSDPGFVLNHEMESCLSGNISQCPRTTVTSDIVPRYAFVNGGVVANCITTTCTCNGIGNR
INQPPDQGVKIITHKECNTIGINGMLFNTNKEGTLAFYTPDDITLNNSVALNPIDISIELNKAKSDLEESKEWLRRVNQ
KLDSIGSGEPEA
SEQ ID NO: 173 PIV200953
MPISILLIITTMIMASHCQIDITKLQHVGVLVNSPKGMKISQNFETRYLILSLIPKIEDSNSCGDQQIKQYKRLLDRLIIPL
YDGLRLMKDVIVTNQESNENTDPRTERFFGGVIGTIALGVATSAQITAAVALVEAKQARSDIEKLKEAIRDTNKAVQ
SVQSSVGNPIVAIKSVQDYVNKEIVPSIARLGCEAAGLQLGIALTQHYSELTNIFGDNIGSLIEKGIKLQGIASLYRTNIT
EIFTTSTVDKYDIYDLLFTESIKVRVIDVDLNDYSITLQVRLPLLTRLLNTQIYKVDSISYNIQNREWYIPLPSHIMTKGAF
LGGADVKECIEAFSSYICPSDPGFVLNHEMESCLSGNISQCPRTTVTSDIVPRYAFVNGGVVANCITTTCTCNGIGNR
INQPPDQGVKIITHKECNTIGINGMLFNTNKEGTLAFYTPDDITLNNSVALNPIDISIELNKVKSDLEEVKEWLRRSNQ
KLDSIGSGEPEA
SEQ ID NO: 174 PIV200954
MPISILLIITTMIMASHCQIDITKLQHVGVLVNSPKGMKISQNFETRYLILSLIPKIEDSNSCGDQQIKQYKRLLDRLIIPL
YDGLRLMKDVIVTNQESNENTDPRTERFFGGVIGTIALGVATSAQITAAVALVEAKQARSDIEKLKEAIRDTNKAVQ
SVQSSVGNPIVAIKSVQDYVNKEIVPSIARLGCEAAGLQLGIALTQHYSELTNIFGDNIGSLIEKGIKLQGIASLYRTNIT
EIFTTSTVDKYDIYDLLFTESIKVRVIDVDLNDYSITLQVRLPLLTRLLNTQIYKVDSISYNIQNREWYIPLPSHIMTKGAF
LGGADVKECIEAFSSYICPSDPGFVLNHEMESCLSGNISQCPRTTVTSDIVPRYAFVNGGVVANCITTTCTCNGIGNR
INQPPDQGVKIITHKECNTIGINGMLFNTNKEGTLAFYTPDDITLNNSVALNPIDISIELNKVKSDLEEVKEWIRRVNQ
KLDSIGSGEPEA
SEQ ID NO: 175 PIV200955
MPISILLIITTMIMASHCQIDITKLQHVGVLVNSPKGMKISQNFETRYLILSLIPKIEDSNSCGDQQIKQYKRLLDRLIIPL
YDGLRLMKDVIVTNQESNENTDPRTERFFGGVIGTIALGVATSAQITAAVALVEAKQARSDIEKLKEAIRDTNKAVQ
SVQSSVGNPIVAIKSVQDYVNKEIVPSIARLGCEAAGLQLGIALTQHYSELTNIFGDNIGSLIEKGIKLQGIASLYRTNIT
EIFTTSTVDKYDIYDLLFTESIKVRVIDVDLNDYSITLQVRLPLLTRLLNTQIYKVDSISYNIQNREWYIPLPSHIMTKGAF
LGGADVKECIEAFSSYICPSDPGFVLNHEMESCLSGNISQCPRTTVTSDIVPRYAFVNGGVVANCITITCTCNGIGNR
INQPPDQGVKIITHKECNTIGINGMLFNTNKEGTLAFYTPDDITLNNSVALNPIDISIELNKVKSDLEESKEWLRRVNQ
KLDSIGSGEPEA
SEQ ID NO: 176 PIV200956
MPISILLIITTMIMASHCQIDITKLQHVGVLVNSPKGMKISQNFETRYLILSLIPKIEDSNSCGDQQIKQYKRLLDRLIIPL
YDGLRLMKDVIVTNQESNENTDPRTERFFGGVIGTIALGVATSAQITAAVALVEAKQARSDIEKLKEAIRDTNKAVQ
SVQSSVGNPIVAIKSVQDYVNKEIVPSIARLGCEAAGLQLGIALTQHYSELTNIFGDNIGSLIEKGIKLQGIASLYRTNIT
EIFTTSTVDKYDIYDLLFTESIKVRVIDVDLNDYSITLQVRLPLLTRLLNTQIYKVDSISYNIQNREWYIPLPSHIMTKGAF
LGGADVKECIEAFSSYICPSDPGFVLNHEMESCLSGNISQCPRTTVTSDIVPRYAFVNGGVVANCITTTCTCNGIGNR
INQPPDQGVKIITHKECNTIGINGMLFNTNKEGTLAFYTPDDITLNNSVALNPIDISIELNKAKSDLEEVKEWLRRVN
QKLDSIGSGEPEA
SEQ ID NO: 177 PIV200957
MPISILLIITTMIMASHCQIDITKLQHVGVLVNSPKGMKISQNFETRYLILSLIPKIEDSNSCGDQQIKQYKRLLDRLIIPL
YDGLRLMKDVIVTNQESNENTDPRTERFFGGVIGTIALGVATSAQITAAVALVEAKQARSDIEKLKEAIRDTNKAVQ
SVQSSVGNPIVAIKSVQDYVNKEIVPSIARLGCEAAGLQLGIALTQHYSELTNIFGDNIGSLIEKGIKLQGIASLYRTNIT
EIFTTSTVDKYDIYDLLFTESIKVRVIDVDLNDYSITLQVRLPLLTRLLNTQIYKVDSISYNIQNREWYIPLPSHIMTKGAF
LGGADVKECIEAFSSYICPSDPGFVLNHEMESCLSGNISQCPRTTVTSDIVPRYAFVNGGVVANCITTTCTCNGIGNR
INQPPDQGVKIITHKECNTIGINGMLFNTNKEGTLAFYTPDDITLNNSVALNPIDISIELNKVKSDLEEVKEWLRRVN
QKLDSIGSGEPEA
SEQ ID NO: 178 PIV200958
MPISILLIITTMIMASHCQIDITKLQHVGVLVNSPKGMKISQNFETRYLILSLIPKIEDSNSCGDQQIKQYKRLLDRLIIPL
YDGLRLMKDVIVTNQESNENTDPRTERFFGGVIGTIALGVATSAQITAAVALVEAKQARSDIEKLKEAIRDTNKAVQ
SVQSSVGNPIVAIKSVQDYVNKEIVPSIARLGCEAAGLQLGIALTQHYSELTNIFGDNIGSLIEKGIKLQGIASLYRTNIT
EIFTTSTVDKYDIYDLLFTESIKVRVIDVDLNDYSITLQVRLPLLTRLLNTQIYKVDSISYNIQNREWYIPLPSHIMTKGAF
LGGADVKECIEAFSSYICPSDPGFVLNHEMESCLSGNISQCPRTTVTSDIVPRYAFVNGGVVANCITTTCTCNGIGNR
INQPPDQGVKIITHKECNTIGINGMLFNTNKEGTLAFYTPDDITLNNSVALNPIDISIELNKVKSDFEEVKEWLRRVN
QKLDSIGSGEPEA
SEQ ID NO: 179 PIV200960
MPISILLIITTMIMASHCQIDITKLQHVGVLVNSPKGMKISQNFETRYLILSLIPKIEDSNSCGDQQIKQYKRLLDRLIIPL
YDGLRLQKDVIVTNQESNENTDPRTERFFGGVIGTIALGVATSAQITAAVALVEAKQARSDIEKLKEAIRDTNKAVQS
VQSSVGNLIVAIKSVQDYVNKEIVPSIARLGCEAAGLQLGIALTQHYSELTNIFGDNIGSLQEKGIKLQGIASLYRTNIT
EIFTTSTVDKYDIYDLLFTESIKVRVIDVDLNDYSITLQVRLPLLTRLLNTQIYKVDSISYNIQNREWYIPLPSHIMTKGAF
LGGADVKECIEAFSSYICPSDPGFVLNHEMESCLSGNISQCPRTTVTSDIVPRYAFVNGGVVANCITTTCTCNGIGNR
INQPPDQGVKIITHKECNTIGINGMLFNTNKEGTLAFYTPDDITLNNSVALDPIDISIELNKAKSDLEEVKEWIRRSNQ
KLDSIGGSEPEA
SEQ ID NO: 180 PIV200962
MPISILLIITTMIMASHCQIDITKLQHVGVLVNSPKGMKISQNFETRYLILSLIPKIEDSNSCGDQQIKQYKRLLDRLIIPL
YDGLRLQKDVIVTNQESNENTDPRTERFFGGVIGTIALGVATSAQITAAVALVEAKQARSDIEKLKEAIRDTNKAVQS
VQSSVGNLIVAIKSVQDYVNKEIVPSIARLGCEAAGLQLGIALTQHYSELTNIFGDNIGSLQEKGIKLQGIASLYRTNIT
EIFTTSTVDKYDIYDLLFTESIKVRVIDVDLNDYSITLQVRLPLLTRLLNTQIYKVDSISYNIQNREWYIPLPSHIMTKGAF
LGGADVKECIEAFSSYICPSDPGFVLNHEMESCLSGNISQCPRTTVTSDIVPRYAFVNGGVVANCITTTCTCNGIGNR
INQPPDQGVKIITHKECNTIGINGMLFNTNKEGTLAFYTPDDITLNNSVALDPIDISIELNKAKSDLEESKEWIRRVNQ
KLDSIGGSEPEA
SEQ ID NO: 181 PIV200964
MPISILLIITTMIMASHCQIDITKLQHVGVLVNSPKGMKISQNFETRYLILSLIPKIEDSNSCGDQQIKQYKRLLDRLIIPL
YDGLRLQKDVIVTNQESNENTDPRTERFFGGVIGTIALGVATSAQITAAVALVEAKQARSDIEKLKEAIRDTNKAVQS
VQSSVGNLIVAIKSVQDYVNKEIVPSIARLGCEAAGLQLGIALTQHYSELTNIFGDNIGSLQEKGIKLQGIASLYRTNIT
EIFTTSTVDKYDIYDLLFTESIKVRVIDVDLNDYSITLQVRLPLLTRLLNTQIYKVDSISYNIQNREWYIPLPSHIMTKGAF
LGGADVKECIEAFSSYICPSDPGFVLNHEMESCLSGNISQCPRTTVTSDIVPRYAFVNGGVVANCITTTCTCNGIGNR
INQPPDQGVKIITHKECNTIGINGMLFNTNKEGTLAFYTPDDITLNNSVALDPIDISIELNKVKSDLEEVKEWLRRVN
QKLDSIGGSEPEA
SEQ ID NO: 182 PIV200965
MPISILLIITTMIMASHCQIDITKLQHVGVLVNSPKGMKISQNFETRYLILSLIPKIEDSNSCGDQQIKQYKRLLDRLIIPL
YDGLRLQKDVIVTNQESNENTDPRTERFFGGVIGTIALGVATSAQITAAVALVEAKQARSDIEKLKEAIRDTNKAVQS
VQSSVGNLIVAIKSVQDYVNKEIVPSIARLGCEAAGLQLGIALTQHYSELTNIFGDNIGSLQEKGIKLQGIASLYRTNIT
EIFTTSTVDKYDIYDLLFTESIKVRVIDVDLNDYSITLQVRLPLLTRLLNTQIYKVDSISYNIQNREWYIPLPSHIMTKGAF
LGGADVKECIEAFSSYICPSDPGFVLNHEMESCLSGNISQCPRTTVTSDIVPRYAFVNGGVVANCITTTCTCNGIGNR
INQPPDQGVKIITHKECNTIGINGMLFNTNKEGTLAFYTPDDITLNNSVALDPIDISIELNKVKSDFEEVKEWLRRVN
QKLDSIGGSEPEA
SEQ ID NO: 183 PIV200967
MPISILLIITTMIMASHCQIDITKLQHVGVLVNSPKGMKISQNFETRYLILSLIPKIEDSNSCGDQQIKQYKRLLDRLIIPL
YDGLRLQKDVIVTNQESNENTDPRTERFFGGVIGTIALGVATSAQITAAVALVEAKQARSDIEKLKEAIRDTNKAVQS
VQSSPGNLIVAIKSVQDYVNKEIVPCIARLGCEACGLQLGIALTQHYSELTNIFGDNIGSLQEKGIKLQGIASLYRTNIT
EIFTTSTVDKYDIYDLLFTESIKVRVIDVDLNDYSITLQVRLPLLTRLLNTQIYKVDSISYNIQNREWYIPLPSHIMTKGAF
LGGADVKECIEAFSSYICPSDPGFVLNHEMESCLSGNISQCPRTTVTSDIVPRYAFVNGGVVANCITTTCTCNGIGNR
INQPPDQGVKIITHKECNTIGINGMLFNTNKEGTLAFYTPDDITLNNSVALNPIDISIELNKAKSDLEEVKEWIRRSNQ
KLDSIGSGEPEA
SEQ ID NO: 184 PIV200969
MPISILLIITTMIMASHCQIDITKLQHVGVLVNSPKGMKISQNFETRYLILSLIPKIEDSNSCGDQQIKQYKRLLDRLIIPL
YDGLRLQKDVIVTNQESNENTDPRTERFFGGVIGTIALGVATSAQITAAVALVEAKQARSDIEKLKEAIRDTNKAVQS
VQSSPGNLIVAIKSVQDYVNKEIVPCIARLGCEACGLQLGIALTQHYSELTNIFGDNIGSLQEKGIKLQGIASLYRTNIT
EIFTTSTVDKYDIYDLLFTESIKVRVIDVDLNDYSITLQVRLPLLTRLLNTQIYKVDSISYNIQNREWYIPLPSHIMTKGAF
LGGADVKECIEAFSSYICPSDPGFVLNHEMESCLSGNISQCPRTTVTSDIVPRYAFVNGGVVANCITTTCTCNGIGNR
INQPPDQGVKIITHKECNTIGINGMLFNTNKEGTLAFYTPDDITLNNSVALNPIDISIELNKAKSDLEESKEWIRRVNQ
KLDSIGSGEPEA
SEQ ID NO: 185 PIV200971
MPISILLIITTMIMASHCQIDITKLQHVGVLVNSPKGMKISQNFETRYLILSLIPKIEDSNSCGDQQIKQYKRL
LDRLIIPLYDGLRLQKDVIVTNQESNENTDPRTERFFGGVIGTIALGVATSAQITAAVALVEAKQARSDIEKLKEAIRDT
NKAVQSVQSSPGNLIVAIKSVQDYVNKEIVPCIARLGCEACGLQLGIALTQHYSELTNIFGDNIGSLQEKGIKLQGIAS
LYRTNITEIFTTSTVDKYDIYDLLFTESIKVRVIDVDLNDYSITLQVRLPLLTRLLNTQIYKVDSISYNIQNREWYIPLPSHI
MTKGAFLGGADVKECIEAFSSYICPSDPGFVLNHEMESCLSGNISQCPRTTVTSDIVPRYAFVNGGVVANCITTTCT
CNGIGNRINQPPDQGVKIITHKECNTIGINGMLFNTNKEGTLAFYTPDDITLNNSVALNPIDISIELNKVKSDLEEVKE
WIRRSNQKLDSIGSGEPEA
SEQ ID NO: 186 PIV200973
MPISILLIITTMIMASHCQIDITKLQHVGVLVNSPKGMKISQNFETRYLILSLIPKIEDSNSCGDQQIKQYKRLLDRLIIPL
YDGLRLQKDVIVTNQESNENTDPRTERFFGGVIGTIALGVATSAQITAAVALVEAKQARSDIEKLKEAIRDTNKAVQS
VQSSPGNLIVAIKSVQDYVNKEIVPCIARLGCEACGLQLGIALTQHYSELTNIFGDNIGSLQEKGIKLQGIASLYRTNIT
EIFTTSTVDKYDIYDLLFTESIKVRVIDVDLNDYSITLQVRLPLLTRLLNTQIYKVDSISYNIQNREWYIPLPSHIMTKGAF
LGGADVKECIEAFSSYICPSDPGFVLNHEMESCLSGNISQCPRTTVTSDIVPRYAFVNGGVVANCITTTCTCNGIGNR
INQPPDQGVKIITHKECNTIGINGMLFNTNKEGTLAFYTPDDITLNNSVALNPIDISIELNKVKSDLEESKEWIRRVNQ
KLDSIGSGEPEA
SEQ ID NO: 187 PIV200974
MPISILLIITTMIMASHCQIDITKLQHVGVLVNSPKGMKISQNFETRYLILSLIPKIEDSNSCGDQQIKQYKRLLDRLIIPL
YDGLRLQKDVIVTNQESNENTDPRTERFFGGVIGTIALGVATSAQITAAVALVEAKQARSDIEKLKEAIRDTNKAVQS
VQSSPGNLIVAIKSVQDYVNKEIVPCIARLGCEACGLQLGIALTQHYSELTNIFGDNIGSLQEKGIKLQGIASLYRTNIT
EIFTTSTVDKYDIYDLLFTESIKVRVIDVDLNDYSITLQVRLPLLTRLLNTQIYKVDSISYNIQNREWYIPLPSHIMTKGAF
LGGADVKECIEAFSSYICPSDPGFVLNHEMESCLSGNISQCPRTTVTSDIVPRYAFVNGGVVANCITTTCTCNGIGNR
INQPPDQGVKIITHKECNTIGINGMLFNTNKEGTLAFYTPDDITLNNSVALNPIDISIELNKAKSDLEEVKEWLRRSNQ
KLDSIGSGEPEA
SEQ ID NO: 188 PIV200975
MPISILLIITTMIMASHCQIDITKLQHVGVLVNSPKGMKISQNFETRYLILSLIPKIEDSNSCGDQQIKQYKRLLDRLIIPL
YDGLRLQKDVIVTNQESNENTDPRTERFFGGVIGTIALGVATSAQITAAVALVEAKQARSDIEKLKEAIRDTNKAVQS
VQSSPGNLIVAIKSVQDYVNKEIVPCIARLGCEACGLQLGIALTQHYSELTNIFGDNIGSLQEKGIKLQGIASLYRTNIT
EIFTTSTVDKYDIYDLLFTESIKVRVIDVDLNDYSITLQVRLPLLTRLLNTQIYKVDSISYNIQNREWYIPLPSHIMTKGAF
LGGADVKECIEAFSSYICPSDPGFVLNHEMESCLSGNISQCPRTTVTSDIVPRYAFVNGGVVANCITTTCTCNGIGNR
INQPPDQGVKIITHKECNTIGINGMLFNTNKEGTLAFYTPDDITLNNSVALNPIDISIELNKAKSDLEEVKEWIRRVNQ
KLDSIGSGEPEA
SEQ ID NO: 189 PIV200976
MPISILLIITTMIMASHCQIDITKLQHVGVLVNSPKGMKISQNFETRYLILSLIPKIEDSNSCGDQQIKQYKRLLDRLIIPL
YDGLRLQKDVIVTNQESNENTDPRTERFFGGVIGTIALGVATSAQITAAVALVEAKQARSDIEKLKEAIRDTNKAVQS
VQSSPGNLIVAIKSVQDYVNKEIVPCIARLGCEACGLQLGIALTQHYSELTNIFGDNIGSLQEKGIKLQGIASLYRTNIT
EIFTTSTVDKYDIYDLLFTESIKVRVIDVDLNDYSITLQVRLPLLTRLLNTQIYKVDSISYNIQNREWYIPLPSHIMTKGAF
LGGADVKECIEAFSSYICPSDPGFVLNHEMESCLSGNISQCPRTTVTSDIVPRYAFVNGGVVANCITTTCTCNGIGNR
INQPPDQGVKIITHKECNTIGINGMLFNTNKEGTLAFYTPDDITLNNSVALNPIDISIELNKAKSDLEESKEWLRRVNQ
KLDSIGSGEPEA
SEQ ID NO: 190 PIV200977
MPISILLIITTMIMASHCQIDITKLQHVGVLVNSPKGMKISQNFETRYLILSLIPKIEDSNSCGDQQIKQYKRL
LDRLIIPLYDGLRLQKDVIVTNQESNENTDPRTERFFGGVIGTIALGVATSAQITAAVALVEAKQARSDIEKLKEAIRDT
NKAVQSVQSSPGNLIVAIKSVQDYVNKEIVPCIARLGCEACGLQLGIALTQHYSELTNIFGDNIGSLQEKGIKLQGIAS
LYRTNITEIFTTSTVDKYDIYDLLFTESIKVRVIDVDLNDYSITLQVRLPLLTRLLNTQIYKVDSISYNIQNREWYIPLPSHI
MTKGAFLGGADVKECIEAFSSYICPSDPGFVLNHEMESCLSGNISQCPRTTVTSDIVPRYAFVNGGVVANCITTTCT
CNGIGNRINQPPDQGVKIITHKECNTIGINGMLFNTNKEGTLAFYTPDDITLNNSVALNPIDISIELNKVKSDLEEVKE
WLRRSNQKLDSIGSGEPEA
SEQ ID NO: 191 PIV200978
MPISILLIITTMIMASHCQIDITKLQHVGVLVNSPKGMKISQNFETRYLILSLIPKIEDSNSCGDQQIKQYKRLLDRLIIPL
YDGLRLQKDVIVTNQESNENTDPRTERFFGGVIGTIALGVATSAQITAAVALVEAKQARSDIEKLKEAIRDTNKAVQS
VQSSPGNLIVAIKSVQDYVNKEIVPCIARLGCEACGLQLGIALTQHYSELTNIFGDNIGSLQEKGIKLQGIASLYRTNIT
EIFTTSTVDKYDIYDLLFTESIKVRVIDVDLNDYSITLQVRLPLLTRLLNTQIYKVDSISYNIQNREWYIPLPSHIMTKGAF
LGGADVKECIEAFSSYICPSDPGFVLNHEMESCLSGNISQCPRTTVTSDIVPRYAFVNGGVVANCITTTCTCNGIGNR
INQPPDQGVKIITHKECNTIGINGMLFNTNKEGTLAFYTPDDITLNNSVALNPIDISIELNKVKSDLEEVKEWIRRVNQ
KLDSIGSGEPEA
SEQ ID NO: 192 PIV200979
MPISILLIITTMIMASHCQIDITKLQHVGVLVNSPKGMKISQNFETRYLILSLIPKIEDSNSCGDQQIKQYKRLLDRLIIPL
YDGLRLQKDVIVTNQESNENTDPRTERFFGGVIGTIALGVATSAQITAAVALVEAKQARSDIEKLKEAIRDTNKAVQS
VQSSPGNLIVAIKSVQDYVNKEIVPCIARLGCEACGLQLGIALTQHYSELTNIFGDNIGSLQEKGIKLQGIASLYRTNIT
EIFTTSTVDKYDIYDLLFTESIKVRVIDVDLNDYSITLQVRLPLLTRLLNTQIYKVDSISYNIQNREWYIPLPSHIMTKGAF
LGGADVKECIEAFSSYICPSDPGFVLNHEMESCLSGNISQCPRTTVTSDIVPRYAFVNGGVVANCITTTCTCNGIGNR
INQPPDQGVKIITHKECNTIGINGMLFNTNKEGTLAFYTPDDITLNNSVALNPIDISIELNKVKSDLEESKEWLRRVNQ
KLDSIGSGEPEA
SEQ ID NO: 193 PIV200980
MPISILLIITTMIMASHCQIDITKLQHVGVLVNSPKGMKISQNFETRYLILSLIPKIEDSNSCGDQQIKQYKRLLDRLIIPL
YDGLRLQKDVIVTNQESNENTDPRTERFFGGVIGTIALGVATSAQITAAVALVEAKQARSDIEKLKEAIRDTNKAVQS
VQSSPGNLIVAIKSVQDYVNKEIVPCIARLGCEACGLQLGIALTQHYSELTNIFGDNIGSLQEKGIKLQGIASLYRTNIT
EIFTTSTVDKYDIYDLLFTESIKVRVIDVDLNDYSITLQVRLPLLTRLLNTQIYKVDSISYNIQNREWYIPLPSHIMTKGAF
LGGADVKECIEAFSSYICPSDPGFVLNHEMESCLSGNISQCPRTTVTSDIVPRYAFVNGGVVANCITTTCTCNGIGNR
INQPPDQGVKIITHKECNTIGINGMLFNTNKEGTLAFYTPDDITLNNSVALNPIDISIELNKAKSDLEEVKEWLRRVN
QKLDSIGSGEPEA
SEQ ID NO: 194 PIV200982
MPISILLIITTMIMASHCQIDITKLQHVGVLVNSPKGMKISQNFETRYLILSLIPKIEDSNSCGDQQIKQYKRLLDRLIIPL
YDGLRLQKDVIVTNQESNENTDPRTERFFGGVIGTIALGVATSAQITAAVALVEAKQARSDIEKLKEAIRDTNKAVQS
VQSSPGNLIVAIKSVQDYVNKEIVPCIARLGCEACGLQLGIALTQHYSELTNIFGDNIGSLQEKGIKLQGIASLYRTNIT
EIFTTSTVDKYDIYDLLFTESIKVRVIDVDLNDYSITLQVRLPLLTRLLNTQIYKVDSISYNIQNREWYIPLPSHIMTKGAF
LGGADVKECIEAFSSYICPSDPGFVLNHEMESCLSGNISQCPRTTVTSDIVPRYAFVNGGVVANCITITCTCNGIGNR
INQPPDQGVKIITHKECNTIGINGMLFNTNKEGTLAFYTPDDITLNNSVALNPIDISIELNKVKSDFEEVKEWLRRVN
QKLDSIGSGEPEA
SEQ ID NO: 195 PIV201082
MPISILLIITTMIMASHCQIDITKLQHVGVLVNSPKGMKISQNFETRYLILSLIPKIEDSNSCGDQQIKQYKRLLDRLIIPL
YDGLRLQKDVIVTNQESNENTDPRTERFFGGVIGTIALGVATSAQITAAVALVEAKQARSDIEKLKEAIRDTNKAVQS
VQSSVGNLIVAIKSVQDYVNKEIVPSIARLGCEAAGLQLGIALTQHYSELTNIFGDNIGSLQEKGIKLQGIASLYRTNIT
EIFTTSTVDKYDIYDLLFTESIKVRVIDVDLNDYSITLQVRLPLLTRLLNTQIYKVDSISYNIQNREWYIPLPSHIMTKGAF
LGGADVKECIEAFSSYICPSDPGFVLNHEMESCLSGNISQCPRTTVTSDIVPRYAFVNGGVVANCITTTCTCNGIGNR
INQPPDQGVKIITHKECNTIGINGMLFNTNKEGTLAFYTPDDITLNNSVALDPIDISIELNKAKSDLEESKEWIRRSNQ
KLDSIEDKIEEILSKIYHIENEIARIKKLIGEAEPEA
SEQ ID NO: 196: PIV201105
MPISILLIITTMIMASHCQIDITKLQHVGVLVNSPKGMKIPQNFETRYLILSLIPKIEDSNSCGDQQIKQYKRLLDRLIIPL
YDGLRLMKDVIVTNQESNENTDPRTERFFGGVIGTIALGVATSAQITAAVALVEAKQARSDIEKLKEAIRDTNKAVQ
SVQSSVGPPIVAIKSVQDYVNKEIVPSIARLGCEAAGLQLGIALTQHYSELTNIFGDNIGSLIEKGIKLQGIASLYRTNIT
EIFTTSTVDKYDIYDLLFTESIKVRVIDVDLNDYSITLQVRLPLLTRLLNTQIYKVDSISYNIQNREWYIPLPSHIMTKGAF
LGGADVKECIEAFSSYICPSDPGFVLNHEMESCLSGNISQCPRTTVTSDIVPRYAFVNGGVVANCITTTCTCNGIGNR
INQPPDQGVKIITHKECNTIGINGMLFNTNKEGTLAFYTPDDITLNNSVALNPIDISIELNKAKSDLEEVKEWIRRVNQ
KLDSIGSGEPEA
SEQ ID NO: 197 PIV201106
MPISILLIITTMIMASHCQIDITKLQHVGVLVNSPKGMKISQNFETRYLILSLIPKIEDSNSCGDQQIKQYKRLLDRLIIPL
YDGLRLMKDVIVTNQESNENTDPRTERFFGGVIGTIALGVATSAQITAAVALVEAKQARSDIEKLKEAIRDTNKAVQ
SVQSSVGPPIVAIKSVQDYVNKEIVPSIARLGCEAAGLQLGIALTQHYSELTNIFGDNIGSLIEKGIKLQGIASLYRTNIT
EIFTTSTVDKYDIYDLLFTESIKVRVIDVDLNDYSITLQVRLPLLTRLLNTQIYKVDSISYNIQNREWYIPLPSHIMTKGAF
LGGADVKECIEAFSSYICPSDPGFVLNHEMESCLSGNISQCPRTTVTSDIVPRYAFVNGGVVANCITTTCTCNGIGNR
INQPPDQGVKIITHKECNTIGINGMLFNTNKEGTLAFYTPDDITLNNSVALNPIDISIELNKAKSDLEEVKEWIRRVNQ
KLDSIGSGEPEA
SEQ ID NO: 198 PIV201107
MPISILLIITTMIMASHCQIDITKLQHVGVLVNSPKGMKIPQNFETRYLILSLIPKIEDSNSCGDQQIKQYKRLLDRLIIPL
YDGLRLQKDVIVTNQESNENTDPRTERFFGGVIGTIALGVATSAQITAAVALVEAKQARSDIEKLKEAIRDTNKAVQS
VQSSVGPPIVAIKSVQDYVNKEIVPSIARLGCEAAGLQLGIALTQHYSELTNIFGDNIGSLQEKGIKLQGIASLYRTNIT
EIFTTSTVDKYDIYDLLFTESIKVRVIDVDLNDYSITLQVRLPLLTRLLNTQIYKVDSISYNIQNREWYIPLPSHIMTKGAF
LGGADVKECIEAFSSYICPSDPGFVLNHEMESCLSGNISQCPRTTVTSDIVPRYAFVNGGVVANCITTTCTCNGIGNR
INQPPDQGVKIITHKECNTIGINGMLFNTNKEGTLAFYTPDDITLNNSVALNPIDISIELNKAKSDLEEVKEWIRRVNQ
KLDSIGSGEPEA
SEQ ID NO: 199 PIV201108
MPISILLIITTMIMASHCQIDITKLQHVGVLVNSPKGMKIPQNFETRYLILSLIPKIEDSNSCGDQQIKQYKRLLDRLIIPL
YDGLRLMKDVIVTNQESNENTDPRTERFFGGVIGTIALGVATSAQITAAVALVEAKQARSDIEKLKEAIRDTNKAVQ
SVQSSVGNPIVAIKSVQDYVNKEIVPSIARLGCEAAGLQLGIALTQHYSELTNIFGDNIGSLIEKGIKLQGIASLYRTNIT
EIFTTSTVDKYDIYDLLFTESIKVRVIDVDLNDYSITLQVRLPLLTRLLNTQIYKVDSISYNIQNREWYIPLPSHIMTKGAF
LGGADVKECIEAFSSYICPSDPGFVLNHEMESCLSGNISQCPRTTVTSDIVPRYAFVNGGVVANCITTTCTCNGIGNR
INQPPDQGVKIITHKECNTIGINGMLFNTNKEGTLAFYTPDDITLNNSVALNPIDISIELNKAKSDLEEVKEWIRRVNQ
KLDSIGSGEPEA
SEQ ID NO: 200 PIV201109
MPISILLIITTMIMASHCQIDITKLQHVGVLVNSPKGMKIPQNFETRYLILSLIPKIEDSNSCGDQQIKQYKRLLDRLIIPL
YDGLRLMKDVIVTNQESNENTDPRTERFFGGVIGTIALGVATSAQITAAVALVEAKQARSDIEKLKEAIRDTNKAVQ
SVQSSVGPLIVAIKSVQDYVNKEIVPSIARLGCEAAGLQLGIALTQHYSELTNIFGDNIGSLIEKGIKLQGIASLYRTNITE
IFTTSTVDKYDIYDLLFTESIKVRVIDVDLNDYSITLQVRLPLLTRLLNTQIYKVDSISYNIQNREWYIPLPSHIMTKGAFL
GGADVKECIEAFSSYICPSDPGFVLNHEMESCLSGNISQCPRTTVTSDIVPRYAFVNGGVVANCITTTCTCNGIGNRI
NQPPDQGVKIITHKECNTIGINGMLFNTNKEGTLAFYTPDDITLNNSVALNPIDISIELNKAKSDLEEVKEWIRRVNQ
KLDSIGSGEPEA
SEQ ID NO: 201 PIV201110
MPISILLIITTMIMASHCQIDITKLQHVGVLVNSPKGMKIPQNFETRYLILSLIPKIEDSNSCGDQQIKQYKRLLDRLIIPL
YDGLRLMKDVIVTNQESNENTDPRTERFFGGVIGTIALGVATSAQITAAVALVEAKQARSDIEKLKEAIRDTNKAVQ
SVQSSVGPPIVAIKSVQDYVNKEIVPSIARLGCEAAGLQLGIALTQHYSELTNIFGDNIGSLIEKGIKLQGIASLYRTNIT
EIFTTSTVDKYDIYDLLFTESIKVRVIDVDLNDYSITLQVRLPLLTRLLNTQIYKVDSISYNIQNREWYIPLPSHIMTKGAF
LGGADVKECIEAFSSYICPSDPGFVLNHEMESCLSGNISQCPRTTVTSDIVPRYAFVNGGVVANCITTTCTCNGIGNR
INQPPDQGVKIITHKECNTIGINGMLFNTNKEGTLAFYTPDDITLNNSVALDPIDISIELNKAKSDLEEVKEWIRRVNQ
KLDSIGSGEPEA
SEQ ID NO: 202 PIV201111
MPISILLIITTMIMASHCQIDITKLQHVGVLVNSPKGMKIPQNFETRYLILSLIPKIEDSNSCGDQQIKQYKRLLDRLIIPL
YDGLRLMKDVIVTNQESNENTDPRTERFFGGVIGTIALGVATSAQITAAVALVEAKQARSDIEKLKEAIRDTNKAVQ
SVQSSVGPPIVAIKSVQDYVNKEIVPSIARLGCEAAGLQLGIALTQHYSELTNIFGDNIGSLIEKGIKLQGIASLYRTNIT
EIFTTSTVDKYDIYDLLFTESIKVRVIDVDLNDYSITLQVRLPLLTRLLNTQIYKVDSISYNIQNREWYIPLPSHIMTKGAF
LGGADVKECIEAFSSYICPSDPGFVLNHEMESCLSGNISQCPRTTVTSDIVPRYAFVNGGVVANCITTTCTCNGIGNR
INQPPDQGVKIITHKECNTIGINGMLFNTNKEGTLAFYTPDDITLNNSVALNPIDISIELNKAKSDLEESKEWIRRVNQ
KLDSIGSGEPEA
SEQ ID NO: 203 PIV201112
MPISILLIITTMIMASHCQIDITKLQHVGVLVNSPKGMKIPQNFETRYLILSLIPKIEDSNSCGDQQIKQYKRLLDRLIIPL
YDGLRLMKDVIVTNQESNENTDPRTERFFGGVIGTIALGVATSAQITAAVALVEAKQARSDIEKLKEAIRDTNKAVQ
SVQSSVGPPIVAIKSVQDYVNKEIVPSIARLGCEAAGLQLGIALTQHYSELTNIFGDNIGSLIEKGIKLQGIASLYRTNIT
EIFTTSTVDKYDIYDLLFTESIKVRVIDVDLNDYSITLQVRLPLLTRLLNTQIYKVDSISYNIQNREWYIPLPSHIMTKGAF
LGGADVKECIEAFSSYICPSDPGFVLNHEMESCLSGNISQCPRTTVTSDIVPRYAFVNGGVVANCITTTCTCNGIGNR
INQPPDQGVKIITHKECNTIGINGMLFNTNKEGTLAFYTPDDITLNNSVALNPIDISIELNKAKSDLEEVKEWIRRSNQ
KLDSIGSGEPEA
SEQ ID NO: 204 PIV201113
MPISILLIITTMIMASHCQIDITKLQHVGVLVNSPKGMKIPQNFETRYLILSLIPKIEDSNSCGDQQIKQYKRLLDRLIIPL
YDGLRLMKDVIVTNQESNENTDPRTERFFGGVIGTIALGVATSAQITAAVALVEAKQARSDIEKLKEAIRDTNKAVQ
SVQSSVGPPIVAIKSVQDYVNKEIVPSIARLGCEAAGLQLGIALTQHYSELTNIFGDNIGSLIEKGIKLQGIASLYRTNIT
EIFTTSTVDKYDIYDLLFTESIKVRVIDVDLNDYSITLQVRLPLLTRLLNTQIYKVDSISYNIQNREWYIPLPSHIMTKGAF
LGGADVKECIEAFSSYICPSDPGFVLNHEMESCLSGNISQCPRTTVTSDIVPRYAFVNGGVVANCITTTCTCNGIGNR
INQPPDQGVKIITHKECNTIGINGMLFNTNKEGTLAFYTPDDITLNNSVALNPIDISIELNKAKSDLEESKEWIRRSNQ
KLDSIGSGEPEA
SEQ ID NO: 205 PIV201114
MPISILLIITTMIMASHCQIDITKLQHVGVLVNSPKGMKIPQNFETRYLILSLIPKIEDSNSCGDQQIKQYKRLLDRLIIPL
YDGLRLMKDVIVTNQESNENTDPRTERFFGGVIGTIALGVATSAQITAAVALVEAKQARSDIEKLKEAIRDTNKAVQ
SVQSSVGPPIVAIKSVQDYVNKEIVPSIARLGCEAAGLQLGIALTQHYSELTNIFGDNIGSLIEKGIKLQGIASLYRTNIT
EIFTTSTVDKYDIYDLLFTESIKVRVIDVDLNDYSITLQVRLPLLTRLLNTQIYKVDSISYNIQNREWYIPLPSHIMTKGAF
LGGADVKECIEAPSSYICPSDPGFVLNHEMESCLSGNISQCPRTTVTSDIVPRYAFVNGGVVANCITTTCTCNGIGNR
INQPPDQGVKIITHKECNTIGINGMLFNTNKEGTLAFYTPDDITLNNSVALNPIDISIELNKAKSDLEEVKEWIRRVNQ
KLDSIGSGEPEA
SEQ ID NO: 206 PIV201115
MPISILLIITTMIMASHCQIDITKLQHVGVLVNSPKGMKISQNFETRYLILSLIPKIEDSNSCGDQQIKQYKRLLDRLIIPL
YDGLRLMKDVIVTNQESNENTDPRTERFFGGVIGTIALGVATSAQITAAVALVEAKQARSDIEKLKEAIRDTNKAVQ
SVQSSVGNLIVAIKSVQDYVNKEIVPSIARLGCEAAGLQLGIALTQHYSELTNIFGDNIGSLQEKGIKLQGIASLYRTNI
TEIFTTSTVDKYDIYDLLFTESIKVRVIDVDLNDYSITLQVRLPLLTRLLNTQIYKVDSISYNIQNREWYIPLPSHIMTKGA
FLGGADVKECIEAFSSYICPSDPGFVLNHEMESCLSGNISQCPRTTVTSDIVPRYAFVNGGVVANCITTTCTCNGIGN
RINQPPDQGVKIITHKECNTIGINGMLFNTNKEGTLAFYTPDDITLNNSVALNPIDISIELNKAKSDLEESKEWIRRSN
QKLDSIEDKIEEILSKIYHIENEIARIKKLIGEAEPEA
SEQ ID NO: 207 PIV201116
MPISILLIITTMIMASHCQIDITKLQHVGVLVNSPKGMKISQNFETRYLILSLIPKIEDSNSCGDQQIKQYKRLLDRLIIPL
YDGLRLQKDVIVTNQESNENTDPRTERFFGGVIGTIALGVATSAQITAAVALVEAKQARSDIEKLKEAIRDTNKAVQS
VQSSVGNLIVAIKSVQDYVNKEIVPSIARLGCEAAGLQLGIALTQHYSELTNIFGDNIGSLIEKGIKLQGIASLYRTNITEI
FTTSTVDKYDIYDLLFTESIKVRVIDVDLNDYSITLQVRLPLLTRLLNTQIYKVDSISYNIQNREWYIPLPSHIMTKGAFL
GGADVKECIEAFSSYICPSDPGFVLNHEMESCLSGNISQCPRTTVTSDIVPRYAFVNGGVVANCITTTCTCNGIGNRI
NQPPDQGVKIITHKECNTIGINGMLFNTNKEGTLAFYTPDDITLNNSVALNPIDISIELNKAKSDLEESKEWIRRSNQK
LDSIEDKIEEILSKIYHIENEIARIKKLIGEAEPEA
SEQ ID NO: 208 PIV201254
MPISILLIITTMIMASHCQIDITKLQHVGVLVNSPKGMKIPQNFETRYLILSLIPKIEDSNSCGDQQIKQYKRLLDRLIIPL
YDGLRLMKDVIVTNQESNENTDPRTERFFGGVIGTIALGVATSAQITAAVALVEAKQARSDIEKLKEAIRDTNKAVQ
SVQSSVGNPIVAIKSVQDYVNKEIVPSIARLGCEAAGLQLGIALTQHYSELTNIFGDNIGSLIEKGIKLQGIASLYRTNIT
EIFTTSTVDKYDIYDLLFTESIKVRVIDVDLNDYSITLQVRLPLLTRLLNTQIYKVDSISYNIQNREWYIPLPSHIMTKGAF
LGGADVKECIEAFSSYICPSDPGFVLNHEMESCLSGNISQCPRTTVTSDIVPRYAFVNGGVVANCITTTCTCNGIGNR
INQPPDQGVKIITHKECNTIGINGMLFNTNKEGTLAFYTPDDITLNNSVALDPIDISIELNKAKSDLEEVKEWIRRVNQ
KLDSIGSGEPEA
SEQ ID NO: 209 PIV201255
MPISILLIITTMIMASHCQIDITKLQHVGVLVNSPKGMKIPQNFETRYLILSLIPKIEDSNSCGDQQIKQYKRLLDRLIIPL
YDGLRLMKDVIVTNQESNENTDPRTERFFGGVIGTIALGVATSAQITAAVALVEAKQARSDIEKLKEAIRDTNKAVQ
SVQSSVGNPIVAIKSVQDYVNKEIVPSIARLGCEAAGLQLGIALTQHYSELTNIFGDNIGSLIEKGIKLQGIASLYRTNIT
EIFTTSTVDKYDIYDLLFTESIKVRVIDVDLNDYSITLQVRLPLLTRLLNTQIYKVDSISYNIQNREWYIPLPSHIMTKGAF
LGGADVKECIEAPSSYICPSDPGFVLNHEMESCLSGNISQCPRTTVTSDIVPRYAFVNGGVVANCITTTCTCNGIGNR
INQPPDQGVKIITHKECNTIGINGMLFNTNKEGTLAFYTPDDITLNNSVALDPIDISIELNKAKSDLEEVKEWIRRVNQ
KLDSIGSGEPEA
SEQ ID NO: 210 PIV201256
MPISILLIITTMIMASHCQIDITKLQHVGVLVNSPKGMKIPQNFETRYLILSLIPKIEDSNSCGDQQIKQYKRLLDRLIIPL
YDGLRLMKDVIVTNQESNENTDPRTERFFGGVIGTIALGVATSAQITAAVALVEAKQARSDIEKLKEAIRDTNKAVQ
SVQSSVGPPIVAIKSVQDYVNKEIVPSIARLGCEAAGLQLGIALTQHYSELTNIFGDNIGSLIEKGIKLQGIASLYRTNIT
EIFTTSTVDKYDIYDLLFTESIKVRVIDVDLNDYSITLQVRLPLLTRLLNTQIYKVDSISYNIQNREWYIPLPSHIMTKGAF
LGGADVKECIEAPSSYICPSDPGFVLNHEMESCLSGNISQCPRTTVTSDIVPRYAFVNGGVVANCITTTCTCNGIGNR
INQPPDQGVKIITHKECNTIGINGMLFNTNKEGTLAFYTPDDITLNNSVALDPIDISIELNKAKSDLEEVKEWIRRVNQ
KLDSIGSGEPEA
SEQ ID NO: 211 PIV201257
MPISILLIITTMIMASHCQIDITKLQHVGVLVNSPKGMKIPQNFETRYLILSLIPKIEDSNSCGDQQIKQYKRLLDRLIIPL
YDGLRLMKDVIVTNQESNENTDPRTERFFGGVIGTIALGVATSAQITAAVALVEAKQARSDIEKLKEAIRDTNKAVQ
SVQSSVGNPIVAIKSVQDYVNKEIVPSIARLGCEAAGLQLGIALTQHYSELTNIFGDNIGSLIEKGIKLQGIASLYRTNIT
EIFTTSTVDKYDIYDLLFTESIKVRVIDVDLNDYSITLQVRLPLLTRLLNTQIYKVDSISYNIQNREWYIPLPSHIMTKGAF
LGGADVKECIEAPSSYICPSDPGFVLNHEMESCLSGNISQCPRTTVTSDIVPRYAFVNGGVVANCITTTCTCNGIGNR
INQPPDQGVKIITHKECNTIGINGMLFNTNKEGTLAFYTPDDITLNNSVALNPIDISIELNKAKSDLEEVKEWIRRVNQ
KLDSIGSGEPEA
SEQ ID NO: 212 PIV210233
MPISILLIITTMIMASHCQIDITKLQHVGVLVNSPKGMKISQNFETRYLILSLIPKIEDSNSCGDQQIKQYKRLLDRLIIPL
YDGLRLMKDVIVTNQESNENTDPRTERFFGGVIGTIALGVATSAQITAAVALVEAKQARSDIEKLKEAIRDTNKAVQ
SVQSSVGNPIVAIKSVQDYVNKEIVPSIARLGCEAAGLQLGIALTQHYSELTNIFGDNIGSLIEKGIKLQGIASLYRTNIT
EIFTTSTVDKYDIYDLLFTESIKVRVIDVDLNDYSITLQVRLPLLTRLLNTQIYKVDSISYNIQNREWYIPLPSHIMTKGAF
LGGADVKECIEAFSSYICPSDPGFVLNHEMESCLSGNISQCPRTTVTSDIVPRYAFVNGGVVANCITTTCTCNGIGNR
INQPPDQGVKIITHKECNTIGINGMLFNTNKEGTLAFYTPDDITLNNSVALDPIDISIELNKAKSDLEEVKEWIRRVNQ
KLDSIGSGEPEA
SEQ ID NO: 213 PIV210234
MPISILLIITTMIMASHCQIDITKLQHVGVLVNSPKGMKIPQNFETRYLILSLIPKIEDSNSCGDQQIKQYKRLLDRLIIPL
YDGLRLQKDVIVTNQESNENTDPRTERFFGGVIGTIALGVATSAQITAAVALVEAKQARSDIEKLKEAIRDTNKAVQS
VQSSVGNPIVAIKSVQDYVNKEIVPSIARLGCEAAGLQLGIALTQHYSELTNIFGDNIGSLQEKGIKLQGIASLYRTNIT
EIFTTSTVDKYDIYDLLFTESIKVRVIDVDLNDYSITLQVRLPLLTRLLNTQIYKVDSISYNIQNREWYIPLPSHIMTKGAF
LGGADVKECIEAFSSYICPSDPGFVLNHEMESCLSGNISQCPRTTVTSDIVPRYAFVNGGVVANCITTTCTCNGIGNR
INQPPDQGVKIITHKECNTIGINGMLFNTNKEGTLAFYTPDDITLNNSVALDPIDISIELNKAKSDLEEVKEWIRRVNQ
KLDSIGSGEPEA
SEQ ID NO: 214 PIV210235
MPISILLIITTMIMASHCQIDITKLQHVGVLVNSPKGMKIPQNFETRYLILSLIPKIEDSNSCGDQQIKQYKRLLDRLIIPL
YDGLRLMKDVIVTNQESNENTDPRTERFFGGVIGTIALGVATSAQITAAVALVEAKQARSDIEKLKEAIRDTNKAVQ
SVQSSVGNLIVAIKSVQDYVNKEIVPSIARLGCEAAGLQLGIALTQHYSELTNIFGDNIGSLIEKGIKLQGIASLYRTNIT
EIFTTSTVDKYDIYDLLFTESIKVRVIDVDLNDYSITLQVRLPLLTRLLNTQIYKVDSISYNIQNREWYIPLPSHIMTKGAF
LGGADVKECIEAFSSYICPSDPGFVLNHEMESCLSGNISQCPRTTVTSDIVPRYAFVNGGVVANCITTTCTCNGIGNR
INQPPDQGVKIITHKECNTIGINGMLFNTNKEGTLAFYTPDDITLNNSVALDPIDISIELNKAKSDLEEVKEWIRRVNQ
KLDSIGSGEPEA
SEQ ID NO: 215 PIV210236
MPISILLIITTMIMASHCQIDITKLQHVGVLVNSPKGMKIPQNFETRYLILSLIPKIEDSNSCGDQQIKQYKRLLDRLIIPL
YDGLRLMKDVIVTNQESNENTDPRTERFFGGVIGTIALGVATSAQITAAVALVEAKQARSDIEKLKEAIRDTNKAVQ
SVQSSVGNPIVAIKSVQDYVNKEIVPSIARLGCEAAGLQLGIALTQHYSELTNIFGDNIGSLIEKGIKLQGIASLYRTNIT
EIFTTSTVDKYDIYDLLFTESIKVRVIDVDLNDYSITLQVRLPLLTRLLNTQIYKVDSISYNIQNREWYIPLPSHIMTKGAF
LGGADVKECIEAFSSYICPSDPGFVLNHEMESCLSGNISQCPRTTVTSDIVPRYAFVNGGVVANCITTTCTCNGIGNR
INQPPDQGVKIITHKECNTIGINGMLFNTNKEGTLAFYTPDDITLNNSVALDPIDISIELNKAKSDLEESKEWIRRVNQ
KLDSIGSGEPEA
SEQ ID NO: 216 PIV210237
MPISILLIITTMIMASHCQIDITKLQHVGVLVNSPKGMKIPQNFETRYLILSLIPKIEDSNSCGDQQIKQYKRLLDRLIIPL
YDGLRLMKDVIVTNQESNENTDPRTERFFGGVIGTIALGVATSAQITAAVALVEAKQARSDIEKLKEAIRDTNKAVQ
SVQSSVGNPIVAIKSVQDYVNKEIVPSIARLGCEAAGLQLGIALTQHYSELTNIFGDNIGSLIEKGIKLQGIASLYRTNIT
EIFTTSTVDKYDIYDLLFTESIKVRVIDVDLNDYSITLQVRLPLLTRLLNTQIYKVDSISYNIQNREWYIPLPSHIMTKGAF
LGGADVKECIEAFSSYICPSDPGFVLNHEMESCLSGNISQCPRTTVTSDIVPRYAFVNGGVVANCITTTCTCNGIGNR
INQPPDQGVKIITHKECNTIGINGMLFNTNKEGTLAFYTPDDITLNNSVALDPIDISIELNKAKSDLEEVKEWIRRSNQ
KLDSIGSGEPEA
SEQ ID NO: 217 PIV210238
MPISILLIITTMIMASHCQIDITKLQHVGVLVNSPKGMKIPQNFETRYLILSLIPKIEDSNSCGDQQIKQYKRLLDRLIIPL
YDGLRLMKDVIVTNQESNENTDPRTERFFGGVIGTIALGVATSAQITAAVALVEAKQARSDIEKLKEAIRDTNKAVQ
SVQSSVGNPIVAIKSVQDYVNKEIVPSIARLGCEAAGLQLGIALTQHYSELTNIFGDNIGSLIEKGIKLQGIASLYRTNIT
EIFTTSTVDKYDIYDLLFTESIKVRVIDVDLNDYSITLQVRLPLLTRLLNTQIYKVDSISYNIQNREWYIPLPSHIMTKGAF
LGGADVKECIEAFSSYICPSDPGFVLNHEMESCLSGNISQCPRTTVTSDIVPRYAFVNGGVVANCITTTCTCNGIGNR
INQPPDQGVKIITHKECNTIGINGMLFNTNKEGTLAFYTPDDITLNNSVALDPIDISIELNKAKSDLEESKEWIRRSNQ
KLDSIGSGEPEA
SEQ ID NO: 218 PIV210294
MPISILLIITTMIMASHCQIDITKLQHVGVLVNSPKGMKISQNFETRYLILSLIPKIEDSNSCGDQQIKQYKRLLDRLIIPL
YDGLRLQKDVIVTNQESNENTDPRTERFFGGVIGTIALGVATSAQITAAVALVEAKQARSDIEKLKEAIRDTNKAVQS
VQSSVGNLIVAIKSVQDYVNKEIVPSIARLGCEAAGLQLGIALTQHYSELTNIFGDNIGSLQEKGIKLQGIASLYRTNIT
EIFTTSTVDKYDIYDLLFTESIKVRVIDVDLNDYSITLQVRLPLLTRLLNTQIYKVDSISYNIQNREWYIPLPSHIMTKGAF
LGGADVKECIEAFSSYICPSDPGFVLNHEMESCLSGNISQCPRTTVTSDIVPRYAFVNGGVVANCITTTCTCNGIGNR
INQPPDQGVKIITHKECNTIGINGMLFNTNKEGTLAFYTPDDITLNNSVALDPIDISIELNKAKSDLEEvKEWIRRvNQ
KLDSIGGSEPEA
SEQ ID NO: 219 PIV210295
MPISILLIITTMIMASHCQIDITKLQHVGVLVNSPKGMKIpQNFETRYLILSLIPKIEDSNSCGDQQIKQYKRLLDRLIIPL
YDGLRLQKDVIVTNQESNENTDPRTERFFGGVIGTIALGVATSAQITAAVALVEAKQARSDIEKLKEAIRDTNKAVQS
VQSSVGNLIVAIKSVQDYVNKEIVPSIARLGCEAAGLQLGIALTQHYSELTNIFGDNIGSLQEKGIKLQGIASLYRTNIT
EIFTTSTVDKYDIYDLLFTESIKVRVIDVDLNDYSITLQVRLPLLTRLLNTQIYKVDSISYNIQNREWYIPLPSHIMTKGAF
LGGADVKECIEAFSSYICPSDPGFVLNHEMESCLSGNISQCPRTTVTSDIVPRYAFVNGGVVANCITTTCTCNGIGNR
INQPPDQGVKIITHKECNTIGINGMLFNTNKEGTLAFYTPDDITLNNSVALDPIDISIELNKAKSDLEESKEWIRRSNQ
KLDSIGGSEPEA
SEQ ID NO: 220 PIV210296
MPISILLIITTMIMASHCQIDITKLQHVGVLVNSPKGMKIpQNFETRYLILSLIPKIEDSNSCGDQQIKQYKRLLDRLIIPL
YDGLRLQKDVIVTNQESNENTDPRTERFFGGVIGTIALGVATSAQITAAVALVEAKQARSDIEKLKEAIRDTNKAVQS
VQSSVGNLIVAIKSVQDYVNKEIVPSIARLGCEAAGLQLGIALTQHYSELTNIFGDNIGSLQEKGIKLQGIASLYRTNIT
EIFTTSTVDKYDIYDLLFTESIKVRVIDVDLNDYSITLQVRLPLLTRLLNTQIYKVDSISYNIQNREWYIPLPSHIMTKGAF
LGGADVKECIEAFSSYICPSDPGFVLNHEMESCLSGNISQCPRTTVTSDIVPRYAFVNGGVVANCITTTCTCNGIGNR
INQPPDQGVKIITHKECNTIGINGMLFNTNKEGTLAFYTPDDITLNNSVALDPIDISIELNKAKSDLEEvKEWIRRvNQ
KLDSIGGSEPEA
SEQ ID NO: 221 PIV210297
MPISILLIITTMIMASHCQIDITKLQHVGVLVNSPKGMKISQNFETRYLILSLIPKIEDSNSCGDQQIKQYKRLLDRLIIPL
YDGLRLQKDVIVTNQESNENTDPRTERFFGGVIGTIALGVATSAQITAAVALVEAKQARSDIEKLKEAIRDTNKAVQS
VQSSVGNpIVAIKSVQDYVNKEIVPSIARLGCEAAGLQLGIALTQHYSELTNIFGDNIGSLQEKGIKLQGIASLYRTNIT
EIFTTSTVDKYDIYDLLFTESIKVRVIDVDLNDYSITLQVRLPLLTRLLNTQIYKVDSISYNIQNREWYIPLPSHIMTKGAF
LGGADVKECIEAFSSYICPSDPGFVLNHEMESCLSGNISQCPRTTVTSDIVPRYAFVNGGVVANCITTTCTCNGIGNR
INQPPDQGVKIITHKECNTIGINGMLFNTNKEGTLAFYTPDDITLNNSVALDPIDISIELNKAKSDLEESKEWIRRSNQ
KLDSIGGSEPEA
SEQ ID NO: 222 PIV210298
MPISILLIITTMIMASHCQIDITKLQHVGVLVNSPKGMKISQNFETRYLILSLIPKIEDSNSCGDQQIKQYKRLLDRLIIPL
YDGLRLQKDVIVTNQESNENTDPRTERFFGGVIGTIALGVATSAQITAAVALVEAKQARSDIEKLKEAIRDTNKAVQS
VQSSVGNpIVAIKSVQDYVNKEIVPSIARLGCEAAGLQLGIALTQHYSELTNIFGDNIGSLQEKGIKLQGIASLYRTNIT
EIFTTSTVDKYDIYDLLFTESIKVRVIDVDLNDYSITLQVRLPLLTRLLNTQIYKVDSISYNIQNREWYIPLPSHIMTKGAF
LGGADVKECIEAFSSYICPSDPGFVLNHEMESCLSGNISQCPRTTVTSDIVPRYAFVNGGVVANCITTTCTCNGIGNR
INQPPDQGVKIITHKECNTIGINGMLFNTNKEGTLAFYTPDDITLNNSVALDPIDISIELNKAKSDLEEvKEWIRRvNQ
KLDSIGGSEPEA
SEQ ID NO: 223 PIV210299
MPISILLIITTMIMASHCQIDITKLQHVGVLVNSPKGMKISQNFETRYLILSLIPKIEDSNSCGDQQIKQYKRLLDRLIIPL
YDGLRLQKDVIVTNQESNENTDPRTERFFGGVIGTIALGVATSAQITAAVALVEAKQARSDIEKLKEAIRDTNKAVQS
VQSSVGpLIVAIKSVQDYVNKEIVPSIARLGCEAAGLQLGIALTQHYSELTNIFGDNIGSLQEKGIKLQGIASLYRTNITE
IFTTSTVDKYDIYDLLFTESIKVRVIDVDLNDYSITLQVRLPLLTRLLNTQIYKVDSISYNIQNREWYIPLPSHIMTKGAFL
GGADVKECIEAFSSYICPSDPGFVLNHEMESCLSGNISQCPRTTVTSDIVPRYAFVNGGVVANCITTTCTCNGIGNRI
NQPPDQGVKIITHKECNTIGINGMLFNTNKEGTLAFYTPDDITLNNSVALDPIDISIELNKAKSDLEESKEWIRRSNQK
LDSIGGSEPEA
SEQ ID NO: 224 PIV210300
MPISILLIITTMIMASHCQIDITKLQHVGVLVNSPKGMKISQNFETRYLILSLIPKIEDSNSCGDQQIKQYKRLLDRLIIPL
YDGLRLQKDVIVTNQESNENTDPRTERFFGGVIGTIALGVATSAQITAAVALVEAKQARSDIEKLKEAIRDTNKAVQS
VQSSVGpLIVAIKSVQDYVNKEIVPSIARLGCEAAGLQLGIALTQHYSELTNIFGDNIGSLQEKGIKLQGIASLYRTNITE
IFTTSTVDKYDIYDLLFTESIKVRVIDVDLNDYSITLQVRLPLLTRLLNTQIYKVDSISYNIQNREWYIPLPSHIMTKGAFL
GGADVKECIEAFSSYICPSDPGFVLNHEMESCLSGNISQCPRTTVTSDIVPRYAFVNGGVVANCITTTCTCNGIGNRI
NQPPDQGVKIITHKECNTIGINGMLFNTNKEGTLAFYTPDDITLNNSVALDPIDISIELNKAKSDLEEvKEWIRRvNQK
LDSIGGSEPEA
SEQ ID NO: 225 PIV210301
MPISILLIITTMIMASHCQIDITKLQHVGVLVNSPKGMKISQNFETRYLILSLIPKIEDSNSCGDQQIKQYKRLLDRLIIPL
YDGLRLQKDVIVTNQESNENTDPRTERFFGGVIGTIALGVATSAQITAAVALVEAKQARSDIEKLKEAIRDTNKAVQS
VQSSVGNLIVAIKSVQDYVNKEIVPSIARLGCEAAGLQLGIALTQHYSELTNIFGDNIGSLQEKGIKLQGIASLYRTNIT
EIFTTSTVDKYDIYDLLFTESIKVRVIDVDLNDYSITLQVRLPLLTRLLNTQIYKVDSISYNIQNREWYIPLPSHIMTKGAF
LGGADVKECIEApSSYICPSDPGFVLNHEMESCLSGNISQCPRTTVTSDIVPRYAFVNGGVVANCITTTCTCNGIGNR
INQPPDQGVKIITHKECNTIGINGMLFNTNKEGTLAFYTPDDITLNNSVALDPIDISIELNKAKSDLEESKEWIRRSNQ
KLDSIGGSEPEA
SEQ ID NO: 226 PIV210302
MPISILLIITTMIMASHCQIDITKLQHVGVLVNSPKGMKISQNFETRYLILSLIPKIEDSNSCGDQQIKQYKRLLDRLIIPL
YDGLRLQKDVIVTNQESNENTDPRTERFFGGVIGTIALGVATSAQITAAVALVEAKQARSDIEKLKEAIRDTNKAVQS
VQSSVGNLIVAIKSVQDYVNKEIVPSIARLGCEAAGLQLGIALTQHYSELTNIFGDNIGSLQEKGIKLQGIASLYRTNIT
EIFTTSTVDKYDIYDLLFTESIKVRVIDVDLNDYSITLQVRLPLLTRLLNTQIYKVDSISYNIQNREWYIPLPSHIMTKGAF
LGGADVKECIEApSSYICPSDPGFVLNHEMESCLSGNISQCPRTTVTSDIVPRYAFVNGGVVANCITTTCTCNGIGNR
INQPPDQGVKIITHKECNTIGINGMLFNTNKEGTLAFYTPDDITLNNSVALDPIDISIELNKAKSDLEEvKEWIRRvNQ
KLDSIGGSEPEA
SEQ ID NO: 227 PIV210303
MPISILLIITTMIMASHCQIDITKLQHVGVLVNSPKGMKISQNFETRYLILSLIPKIEDSNSCGDQQIKQYKRLLDRLIIPL
YDGLRLmKDVIVTNQESNENTDPRTERFFGGVIGTIALGVATSAQITAAVALVEAKQARSDIEKLKEAIRDTNKAVQ
SVQSSVGNLIVAIKSVQDYVNKEIVPSIARLGCEAAGLQLGIALTQHYSELTNIFGDNIGSLIEKGIKLQGIASLYRTNIT
EIFTTSTVDKYDIYDLLFTESIKVRVIDVDLNDYSITLQVRLPLLTRLLNTQIYKVDSISYNIQNREWYIPLPSHIMTKGAF
LGGADVKECIEAFSSYICPSDPGFVLNHEMESCLSGNISQCPRTTVTSDIVPRYAFVNGGVVANCITTTCTCNGIGNR
INQPPDQGVKIITHKECNTIGINGMLFNTNKEGTLAFYTPDDITLNNSVALDPIDISIELNKAKSDLEESKEWIRRSNQ
KLDSIGGSEPEA
SEQ ID NO: 228 PIV210304
MPISILLIITTMIMASHCQIDITKLQHVGVLVNSPKGMKISQNFETRYLILSLIPKIEDSNSCGDQQIKQYKRLLDRLIIPL
YDGLRLmKDVIVTNQESNENTDPRTERFFGGVIGTIALGVATSAQITAAVALVEAKQARSDIEKLKEAIRDTNKAVQ
SVQSSVGNLIVAIKSVQDYVNKEIVPSIARLGCEAAGLQLGIALTQHYSELTNIFGDNIGSLIEKGIKLQGIASLYRTNIT
EIFTTSTVDKYDIYDLLFTESIKVRVIDVDLNDYSITLQVRLPLLTRLLNTQIYKVDSISYNIQNREWYIPLPSHIMTKGAF
LGGADVKECIEAFSSYICPSDPGFVLNHEMESCLSGNISQCPRTTVTSDIVPRYAFVNGGVVANCITTTCTCNGIGNR
INQPPDQGVKIITHKECNTIGINGMLFNTNKEGTLAFYTPDDITLNNSVALDPIDISIELNKAKSDLEEvKEWIRRvNQ
KLDSIGGSEPEA
SEQ ID NO: 229 PIV210305
MPISILLIITTMIMASHCQIDITKLQHVGVLVNSPKGMKIpQNFETRYLILSLIPKIEDSNSCGDQQIKQYKRLLDRLIIPL
YDGLRLQKDVIVTNQESNENTDPRTERFFGGVIGTIALGVATSAQITAAVALVEAKQARSDIEKLKEAIRDTNKAVQS
VQSSVGNpIVAIKSVQDYVNKEIVPSIARLGCEAAGLQLGIALTQHYSELTNIFGDNIGSLQEKGIKLQGIASLYRTNIT
EIFTTSTVDKYDIYDLLFTESIKVRVIDVDLNDYSITLQVRLPLLTRLLNTQIYKVDSISYNIQNREWYIPLPSHIMTKGAF
LGGADVKECIEAFSSYICPSDPGFVLNHEMESCLSGNISQCPRTTVTSDIVPRYAFVNGGVVANCITTTCTCNGIGNR
INQPPDQGVKIITHKECNTIGINGMLFNTNKEGTLAFYTPDDITLNNSVALDPIDISIELNKAKSDLEESKEWIRRSNQ
KLDSIGGSEPEA
SEQ ID NO: 230 PIV210306
MPISILLIITTMIMASHCQIDITKLQHVGVLVNSPKGMKIpQNFETRYLILSLIPKIEDSNSCGDQQIKQYKRLLDRLIIPL
YDGLRLQKDVIVTNQESNENTDPRTERFFGGVIGTIALGVATSAQITAAVALVEAKQARSDIEKLKEAIRDTNKAVQS
VQSSVGNpIVAIKSVQDYVNKEIVPSIARLGCEAAGLQLGIALTQHYSELTNIFGDNIGSLQEKGIKLQGIASLYRTNIT
EIFTTSTVDKYDIYDLLFTESIKVRVIDVDLNDYSITLQVRLPLLTRLLNTQIYKVDSISYNIQNREWYIPLPSHIMTKGAF
LGGADVKECIEAFSSYICPSDPGFVLNHEMESCLSGNISQCPRTTVTSDIVPRYAFVNGGVVANCITTTCTCNGIGNR
INQPPDQGVKIITHKECNTIGINGMLFNTNKEGTLAFYTPDDITLNNSVALDPIDISIELNKAKSDLEEvKEWIRRvNQ
KLDSIGGSEPEA
SEQ ID NO: 231 PIV210307
MPISILLIITTMIMASHCQIDITKLQHVGVLVNSPKGMKISQNFETRYLILSLIPKIEDSNSCGDQQIKQYKRLLDRLIIPL
YDGLRLmKDVIVTNQESNENTDPRTERFFGGVIGTIALGVATSAQITAAVALVEAKQARSDIEKLKEAIRDTNKAVQ
SVQSSVGNpIVAIKSVQDYVNKEIVPSIARLGCEAAGLQLGIALTQHYSELTNIFGDNIGSLIEKGIKLQGIASLYRTNIT
EIFTTSTVDKYDIYDLLFTESIKVRVIDVDLNDYSITLQVRLPLLTRLLNTQIYKVDSISYNIQNREWYIPLPSHIMTKGAF
LGGADVKECIEAFSSYICPSDPGFVLNHEMESCLSGNISQCPRTTVTSDIVPRYAFVNGGVVANCITTTCTCNGIGNR
INQPPDQGVKIITHKECNTIGINGMLFNTNKEGTLAFYTPDDITLNNSVALDPIDISIELNKAKSDLEESKEWIRRSNQ
KLDSIGGSEPEA
SEQ ID NO: 232 PIV210308
MPISILLIITTMIMASHCQIDITKLQHVGVLVNSPKGMKISQNFETRYLILSLIPKIEDSNSCGDQQIKQYKRLLDRLIIPL
YDGLRLmKDVIVTNQESNENTDPRTERFFGGVIGTIALGVATSAQITAAVALVEAKQARSDIEKLKEAIRDTNKAVQ
SVQSSVGNpIVAIKSVQDYVNKEIVPSIARLGCEAAGLQLGIALTQHYSELTNIFGDNIGSLIEKGIKLQGIASLYRTNIT
EIFTTSTVDKYDIYDLLFTESIKVRVIDVDLNDYSITLQVRLPLLTRLLNTQIYKVDSISYNIQNREWYIPLPSHIMTKGAF
LGGADVKECIEAFSSYICPSDPGFVLNHEMESCLSGNISQCPRTTVTSDIVPRYAFVNGGVVANCITTTCTCNGIGNR
INQPPDQGVKIITHKECNTIGINGMLFNTNKEGTLAFYTPDDITLNNSVALDPIDISIELNKAKSDLEEvKEWIRRvNQ
KLDSIGGSEPEA
SEQ ID NO: 233 PIV210309
MPISILLIITTMIMASHCQIDITKLQHVGVLVNSPKGMKISQNFETRYLILSLIPKIEDSNSCGDQQIKQYKRLLDRLIIPL
YDGLRLQKDVIVTNQESNENTDPRTERFFGGVIGTIALGVATSAQITAAVALVEAKQARSDIEKLKEAIRDTNKAVQS
VQSSpGNLIVAIKSVQDYVNKEIVPSIARLGCEAAGLQLGIALTQHYSELTNIFGDNIGSLQEKGIKLQGIASLYRTNIT
EIFTTSTVDKYDIYDLLFTESIKVRVIDVDLNDYSITLQVRLPLLTRLLNTQIYKVDSISYNIQNREWYIPLPSHIMTKGAF
LGGADVKECIEAFSSYICPSDPGFVLNHEMESCLSGNISQCPRTTVTSDIVPRYAFVNGGVVANCITTTCTCNGIGNR
INQPPDQGVKIITHKECNTIGINGMLFNTNKEGTLAFYTPDDITLNNSVALDPIDISIELNKAKSDLEESKEWIRRSNQ
KLDSIGGSEPEA
SEQ ID NO: 234 PIV210310
MPISILLIITTMIMASHCQIDITKLQHVGVLVNSPKGMKISQNFETRYLILSLIPKIEDSNSCGDQQIKQYKRLLDRLIIPL
YDGLRLQKDVIVTNQESNENTDPRTERFFGGVIGTIALGVATSAQITAAVALVEAKQARSDIEKLKEAIRDTNKAVQS
VQSSpGNLIVAIKSVQDYVNKEIVPSIARLGCEAAGLQLGIALTQHYSELTNIFGDNIGSLQEKGIKLQGIASLYRTNIT
EIFTTSTVDKYDIYDLLFTESIKVRVIDVDLNDYSITLQVRLPLLTRLLNTQIYKVDSISYNIQNREWYIPLPSHIMTKGAF
LGGADVKECIEAFSSYICPSDPGFVLNHEMESCLSGNISQCPRTTVTSDIVPRYAFVNGGVVANCITTTCTCNGIGNR
INQPPDQGVKIITHKECNTIGINGMLFNTNKEGTLAFYTPDDITLNNSVALDPIDISIELNKAKSDLEEvKEWIRRvNQ
KLDSIGGSEPEA
SEQ ID NO: 235 PIV210311
MPISILLIITTMIMASHCQIDITKLQHVGVLVNSPKGMKISQNFETRYLILSLIPKIEDSNSCGDQQIKQYKRLLDRLIIPL
YDGLRLQKDVIVTNQESNENTDPRTERFFGGVIGTIALGVATSAQITAAVALVEAKQARSDIEKLKEAIRDTNKAVQS
VQSSVGNLIVAIKSVQDYVNKEIVPSIARLGCEAAGLILGIALTQHYSELTNIFGDNIGSLQEKGIKLQGIASLYRTNITEI
FTTSTVDKYDIYDLLFTESIKVRVIDVDLNDYSITLQVRLPLLTRLLNTQIYKVDSISYNIQNREWYIPLPSHIMTKGAFL
GGADVKECIEAFSSYICPSDPGFVLNHEMESCLSGNISQCPRTTVTSDIVPRYAFVNGGVVANCITTTCTCNGIGNRI
NQPPDQGVKIITHKECNTIGINGMLFNTNKEGTLAFYTPDDITLNNSVALDPIDISIELNKAKSDLEESKEWIRRSNQK
LDSIGGSEPEA
SEQ ID NO: 236 PIV210312
MPISILLIITTMIMASHCQIDITKLQHVGVLVNSPKGMKISQNFETRYLILSLIPKIEDSNSCGDQQIKQYKRL
LDRLIIPLYDGLRLQKDVIVTNQESNENTDPRTERFFGGVIGTIALGVATSAQITAAVALVEAKQARSDIEKLKEAIRDT
NKAVQSVQSSVGNLIVAIKSVQDYVNKEIVPSIARLGCEAAGLILGIALTQHYSELTNIFGDNIGSLQEKGIKLQGIASL
YRTNITEIFTTSTVDKYDIYDLLFTESIKVRVIDVDLNDYSITLQVRLPLLTRLLNTQIYKVDSISYNIQNREWYIPLPSHI
MTKGAFLGGADVKECIEAFSSYICPSDPGFVLNHEMESCLSGNISQCPRTTVTSDIVPRYAFVNGGVVANCITTTCT
CNGIGNRINQPPDQGVKIITHKECNTIGINGMLFNTNKEGTLAFYTPDDITLNNSVALDPIDISIELNKAKSDLEEvKE
WIRRvNQKLDSIGGSEPEA
SEQ ID NO: 237 PIV211368
MPISILLIITTMIMASHCQIDITKLQHVGVLVNSPKGMKIPQNFETRYLILSLIPKIEDSNSCGDQQIKQYKRLLDRLIIPL
YDGLRLMKDVIVTNQESNENTDPRTERFFGGVIGTIALGVATSAQITAAVALVEAKQARSDIEKLKEAIRDTNKAVQ
SVQSSVGNPIVAIKSVQDYVNKEIVPSIARLGCEAAGLQLGIALTQHYSELTNIFGDNIGSLIEKGIKLQGIASLYRTNIT
EIFTTSTVDKYDIYDLLFTESIKVRVIDVDLNDYSITLQVRLPLLTRLLNTQIYKVDSISYNIQNREWYIPLPSHIMTKGAF
LGGADVKECIEAFSSYICPSDPGFVLNHEMESCLSGNISQCPRTTVTSDIVPRYAFVNGGVVANCITTTCTCNGIGNR
INQPPDQGVKIITHKECNTIGINGMLFNTNKEGTLAFYTPDDITLNNSVALDPIDISIELNKAKSDLEEVKEWIRRVNQ
KLDSIG
SEQ ID NO: 238 PIV211886
MPISILLIITTMIMASHCQIDITKLQHVGVLVNSPKGMKISQNFETRYLILSLIPKIEDSNSCGDQQIKQYKRLLDRLIIPL
YDGLRLMKDVIVTNQESNENTDPRTERFFGGVIGTIALGVATSAQITAAVALVEAKQARSDIEKLKEAIRDTNKAVQ
SVQSSVGNPIVAIKSVQDYVNKEIVPSIARLGCEAAGLQLGIALTQHYSELTNIFGDNIGSLIEKGIKLQGIASLYRTNIT
EIFTTSTVDKYDIYDLLFTESIKVRVIDVDLNDYSITLQVRLPLLTRLLNTQIYKVDSISYNIQNREWYIPLPSHIMTKGAF
LGGADVKECIEAFSSYICPSDPGFVLNHEMESCLSGNISQCPRTTVTSDIVPRYAFVNGGVVANCITTTCTCNGIGNR
INQPPDQGVKIITHKECNTIGINGMLFNTNKEGTLAFYTPDDITLNNSVALDPIDISIELNKAKSDLEEVKEWIRRVNQ
KLDSIG
SEQ ID NO: 239 PIV211887
MPISILLIITTMIMASHCQIDITKLQHVGVLVNSPKGMKIPQNFETRYLILSLIPKIEDSNSCGDQQIKQYKRLLDRLIIPL
YDGLRLQKDVIVTNQESNENTDPRTERFFGGVIGTIALGVATSAQITAAVALVEAKQARSDIEKLKEAIRDTNKAVQS
VQSSVGNPIVAIKSVQDYVNKEIVPSIARLGCEAAGLQLGIALTQHYSELTNIFGDNIGSLQEKGIKLQGIASLYRTNIT
EIFTTSTVDKYDIYDLLFTESIKVRVIDVDLNDYSITLQVRLPLLTRLLNTQIYKVDSISYNIQNREWYIPLPSHIMTKGAF
LGGADVKECIEAFSSYICPSDPGFVLNHEMESCLSGNISQCPRTTVTSDIVPRYAFVNGGVVANCITTTCTCNGIGNR
INQPPDQGVKIITHKECNTIGINGMLFNTNKEGTLAFYTPDDITLNNSVALDPIDISIELNKAKSDLEEVKEWIRRVNQ
KLDSIG
SEQ ID NO: 240 PIV211888
MPISILLIITTMIMASHCQIDITKLQHVGVLVNSPKGMKIPQNFETRYLILSLIPKIEDSNSCGDQQIKQYKRLLDRLIIPL
YDGLRLMKDVIVTNQESNENTDPRTERFFGGVIGTIALGVATSAQITAAVALVEAKQARSDIEKLKEAIRDTNKAVQ
SVQSSVGNPIVAIKSVQDYVNKEIVPSIARLGCEAAGLQLGIALTQHYSELTNIFGDNIGSLIEKGIKLQGIASLYRTNIT
EIFTTSTVDKYDIYDLLFTESIKVRVIDVDLNDYSITLQVRLPLLTRLLNTQIYKVDSISYNIQNREWYIPLPSHIMTKGAF
LGGADVKECIEAFSSYICPSDPGFVLNHEMESCLSGNISQCPRTTVTSDIVPRYAFVNGGVVANCITTTCTCNGIGNR
INQPPDQGVKIITHKECNTIGINGMLFNTNKEGTLAFYTPDDITLNNSVALDPIDISIELNKAKSDLEESKEWIRRVNQ
KLDSIG
SEQ ID NO: 241 PIV211889
MPISILLIITTMIMASHCQIDITKLQHVGVLVNSPKGMKIPQNFETRYLILSLIPKIEDSNSCGDQQIKQYKRLLDRLIIPL
YDGLRLMKDVIVTNQESNENTDPRTERFFGGVIGTIALGVATSAQITAAVALVEAKQARSDIEKLKEAIRDTNKAVQ
SVQSSVGNPIVAIKSVQDYVNKEIVPSIARLGCEAAGLQLGIALTQHYSELTNIFGDNIGSLIEKGIKLQGIASLYRTNIT
EIFTTSTVDKYDIYDLLFTESIKVRVIDVDLNDYSITLQVRLPLLTRLLNTQIYKVDSISYNIQNREWYIPLPSHIMTKGAF
LGGADVKECIEAFSSYICPSDPGFVLNHEMESCLSGNISQCPRTTVTSDIVPRYAFVNGGVVANCITTTCTCNGIGNR
INQPPDQGVKIITHKECNTIGINGMLFNTNKEGTLAFYTPDDITLNNSVALDPIDISIELNKAKSDLEEVKEWIRRSNQ
KLDSIG
SEQ ID NO: 242 PIV211890
MPISILLIITTMIMASHCQIDITKLQHVGVLVNSPKGMKIPQNFETRYLILSLIPKIEDSNSCGDQQIKQYKRLLDRLIIPL
YDGLRLMKDVIVTNQESNENTDPRTERFFGGVIGTIALGVATSAQITAAVALVEAKQARSDIEKLKEAIRDTNKAVQ
SVQSSVGNLIVAIKSVQDYVNKEIVPSIARLGCEAAGLQLGIALTQHYSELTNIFGDNIGSLIEKGIKLQGIASLYRTNIT
EIFTTSTVDKYDIYDLLFTESIKVRVIDVDLNDYSITLQVRLPLLTRLLNTQIYKVDSISYNIQNREWYIPLPSHIMTKGAF
LGGADVKECIEAFSSYICPSDPGFVLNHEMESCLSGNISQCPRTTVTSDIVPRYAFVNGGVVANCITTTCTCNGIGNR
INQPPDQGVKIITHKECNTIGINGMLFNTNKEGTLAFYTPDDITLNNSVALDPIDISIELNKAKSDLEEVKEWIRRVNQ
KLDSIG

1. Stabilized pre-fusion human parainfluenza virus 3 (HPIV3) F protein, comprising an F1 and an F2 domain comprising an amino acid sequence of the F1 and F2 domain of an F protein of an HPIV3 strain, comprising a hydrophobic amino acid at position 470 and at position 477, wherein the numbering of the amino acid positions is according to the numbering is amino acid residues in SEQ ID NO: 1.

2. Protein according to claim 1, wherein the hydrophobic amino acid at position 470 and at position 477 is valine (V).

3. Protein according to claim 1 or 2, wherein the amino acid residue at position 452 is N, and/or the amino acid residue at position 41 is P, and/or the amino acid residue at position 167 is P, and/or the amino acid residue at position 168 is P, and/or the amino acid sequence at position 335 is P, and/or the amino acid residue at position 89 is M and the amino acid residue at position 222 is I, and/or the amino acid residue at position 165 is P, and/or the amino acid residue at position 198 is L, and/or comprising a disulfide bridge between the amino acid residues 85 and 221, and/or between 186 and 195, wherein the numbering of the amino acid positions is according to the numbering is amino acid residues in SEQ ID NO: 1.

4. Protein according to any one of claims 1-4, wherein the amino acid residue at position 204 is D and/or the amino acid residue at position 367 is L and/or the amino acid residue at position 436 is P, and/or comprising a disulfide bridge between the amino acid residues 38 and 291.

5. Protein according to any one of the preceding claims, comprising a truncated F1 domain.

6. Protein according to claim 6, wherein the truncated F1 domain does not comprise the transmembrane and cytoplasmic regions.

7. Protein according to claim 6, wherein the truncated F1 domain comprises the amino acids 110-484, preferably the amino acids 110-485 of the HPIV3 F protein.

8. Protein according to any one of claims 1-8, wherein a heterologous trimerization domain is linked to the truncated F1 domain.

9. Stabilized soluble pre-fusion human parainfluenza virus 3 (HPIV3) F protein, comprising a truncated F1 domain and an F2 domain, comprising an amino acid sequence of the F1 and F2 domain of an F protein of an HPIV3 strain, wherein the amino acid residue at position 470 and/or 477 is a hydrophobic amino acid, wherein the numbering of the amino acid positions is according to the numbering is amino acid residues in SEQ ID NO: 1.

10. Protein according to claim 10, wherein the hydrophobic amino acid at position 470 and at position 477 is valine (V).

11. Protein according to claim 10, wherein the truncated F1 domain does not comprise the transmembrane and cytoplasmic regions.

12. Protein according to claim 9, 10 or 11, wherein the protein does not comprise a heterologous trimerization domain.

13. Protein according to any of the claims 9-12, wherein the truncated F1 domain comprises the amino acids 110-484 of the HPIV3 F protein.

14. Protein according to any one of the claims 9-13, wherein the amino acid residue at position 452 is N, and/or the amino acid residue at position 41 is P, and/or the amino acid residue at position 167 is P, and/or the amino acid residue at position 168 is P, and/or the amino acid sequence at position 335 is P, and/or the amino acid residue at position 89 is M and the amino acid residue at position 222 is I.

15. Protein according to any one of claims 9-14, wherein the amino acid residue at position 165 is P, and/or the amino acid residue at position 198 is L, and/or the amino acid residue at position 204 is D, and/or the amino acid at position 367 is L, and/or the amino acid residue at position 436 is P.

16. Protein according to any one of the claims 9-15, further comprising a disulfide bridge between the amino acid residues 85 and 221, and/or between 186 and 195, and/or between 38 and 291.

17. Protein according to any of the preceding claims, comprising an amino acid sequence selected from the group consisting of SEQ ID NO: 199, SEQ ID NO: 201, SEQ ID NO: 208, SEQ ID NO: 209 and SEQ ID NO: 210, or fragments thereof.

18. Nucleic acid molecule encoding a protein according to any one of the preceding claims 1-17.

19. Nucleic acid according to claim 18, wherein the nucleic acid molecule is DNA or RNA.

20. Nucleic acid according to claim 18 or 19, encoding a protein comprising an amino acid sequence selected from the group consisting of SEQ ID NO: 199, SEQ ID NO:
201, SEQ ID NO: 208, SEQ ID NO: 209 and SEQ ID NO: 210, or fragments thereof.

21. Vector comprising a nucleic acid according to claim 18, 19 or 20.

22. Vector according to claim 21, wherein the vector is a human recombinant adenoviral vector.

23. Vector according to claim 22, wherein the adenoviral vector is a replication-incompetent Ad26 adenoviral vector having a deletion of the E1 region and the E3 region.

24. Composition comprising a protein according to any one of the claims 1-17, a nucleic acid according to claim 18, 19 or 21 and/or vector according to claim 21, 22 or 23.

25. Vaccine against PIV3 comprising a composition according to claim 24.

26. A method for vaccinating a subject against PIV3, the method comprising administering to the subject a vaccine according to claim 25.

27. A method for preventing infection and/or replication of PIV3 in a subject, comprising administering to the subject a vaccine according to claim 25.

28. An isolated host cell comprising a nucleic acid according to claim 18, 19 or 20.

29. An isolated host cell comprising a recombinant human adenovirus of serotype 26 comprising a nucleic acid according to claim 18, 19 or 20.

The application's sequence listing, which the Patent Office published only in electronic form, follows.

SEQUENCE LISTING (242 sequences)

SEQ ID NO: 1 - protein, 539 aa, Artificial Sequence
  PIV191469
MPISILLIITTMIMASHCQIDITKLQHVGVLVNSPKGMKISQNFETRYLILSLIPKIEDSNSCGDQQIKQYKRLLDRLIIPLYDGLRLQKDVIVTNQESNENTDPRTERFFGGVIGTIALGVATSAQITAAVALVEAKQARSDIEKLKEAIRDTNKAVQSVQSSVGNLIVAIKSVQDYVNKEIVPSIARLGCEAAGLQLGIALTQHYSELTNIFGDNIGSLQEKGIKLQGIASLYRTNITEIFTTSTVDKYDIYDLLFTESIKVRVIDVDLNDYSITLQVRLPLLTRLLNTQIYKVDSISYNIQNREWYIPLPSHIMTKGAFLGGADVKECIEAFSSYICPSDPGFVLNHEMESCLSGNISQCPRTTVTSDIVPRYAFVNGGVVANCITTTCTCNGIGNRINQPPDQGVKIITHKECNTIGINGMLFNTNKEGTLAFYTPDDITLNNSVALDPIDISIELNKAKSDLEESKEWIRRSNQKLDSIGSWHQSSTTIIVILIMMIILFIINITIITIAIKYYRIQKRDRVDQNDKPYVLTNK

SEQ ID NO: 2 - protein, 491 aa, Artificial Sequence
  PIV190058
MPISILLIITTMIMASHCQIDITKLQHVGVLVNSPKGMKISQNFETRYLILSLIPKIEDSNSCGDQQIKQYKRLLDRLIIPLYDGLRLQKDVIVTNQESNENTDPRTERFFGGVIGTIALGVATSAQITAAVALVEAKQARSDIEKLKEAIRDTNKAVQSVQSSVGNLIVAIKSVQDYVNKEIVPSIARLGCEAAGLQLGIALTQHYSELTNIFGDNIGSLQEKGIKLQGIASLYRTNITEIFTTSTVDKYDIYDLLFTESIKVRVIDVDLNDYSITLQVRLPLLTRLLNTQIYKVDSISYNIQNREWYIPLPSHIMTKGAFLGGADVKECIEAFSSYICPSDPGFVLNHEMESCLSGNISQCPRTTVTSDIVPRYAFVNGGVVANCITTTCTCNGIGNRINQPPDQGVKIITHKECNTIGINGMLFNTNKEGTLAFYTPDDITLNNSVALDPIDISIELNKAKSDLEESKEWIRRSNQKLDSIGGSEPEA

SEQ ID NO: 3 - protein, 23 aa, Artificial Sequence
  GCN4
EDKIEEILSKIYHIENEIARIKK

SEQ ID NO: 4 - protein, 516 aa, Artificial Sequence
  PIV171432
MPISILLIITTMIMASHCQIDITKLQHVGVLVNSPKGMKISQNFETRYLILSLIPKIEDSNSCGDQQIKQYKRLLDRLIIPLYDGLRLQKDVIVTNQESNENTDPRTERFFGGVIGTIALGVATSAQITAAVALVEAKQARSDIEKLKEAIRDTNKAVQSVQSSVGNLIVAIKSVQDYVNKEIVPSIARLGCEAAGLQLGIALTQHYSELTNIFGDNIGSLQEKGIKLQGIASLYRTNITEIFTTSTVDKYDIYDLLFTESIKVRVIDVDLNDYSITLQVRLPLLTRLLNTQIYKVDSISYNIQNREWYIPLPSHIMTKGAFLGGADVKECIEAFSSYICPSDPGFVLNHEMESCLSGNISQCPRTTVTSDIVPRYAFVNGGVVANCITTTCTCNGIGNRINQPPDQGVKIITHKECNTIGINGMLFNTNKEGTLAFYTPDDITLNNSVALNPIDISIELNKAKSDLEESKEWIRRSNQKLDSIEDKIEEILSKIYHIENEIARIKKLIGEAEPEA

SEQ ID NO: 5 - protein, 491 aa, Artificial Sequence
  PIV190059
MPISILLIITTMIMASHCQIDITKLQHVGVLVNSPKGMKISQNFETRYLILSLIPKIEDSNSCGDQQIKQYKRLLDRLIIPLYDGLRLQKDVIVTNQESNENTDPRTERFFGGVIGTIALGVATSAQITAAVALVEAKQARSDIEKLKEAIRDTNKAVQSVQSSVGNLIVAIKSVQDYVNKEIVPSIARLGCEAAGLQLGIALTQHYSELTNIFGDNIGSLQEKGIKLQGIASLYRTNITEIFTTSTVDKYDIYDLLFTESIKVRVIDVDLNDYSITLQVRLPLLTRLLNTQIYKVDSISYNIQNREWYIPLPSHIMTKGAFLGGADVKECIEAFSSYICPSDPGFVLNHEMESCLSGNISQCPRTTVTSDIVPRYAFVNGGVVANCITTTCTCNGIGNRINQPPDQGVKIITHKECNTIGINGMLFNTNKEGTLAFYTPDDITLNNSVALNPIDISIELNKAKSDLEESKEWIRRSNQKLDSIGGSEPEA

SEQ ID NO: 6 - protein, 516 aa, Artificial Sequence
  PIV191486
MPISILLIITTMIMASHCQIDITKLQHVGVLVNSPKGMKISQNFETRYLILSLIPKIEDSNSCGDQQIKQYKRLLDRLIIPLYDGLRLQKDVIVTNQESNENTDPRTERFFGGVIGTIALGVATSAQITAAVALVEAKQARSDIEKLKEAIRDTNKAVQSVQSSPGNLIVAIKSVQDYVNKEIVPCIARLGCEACGLQLGIALTQHYSELTNIFGDNIGSLQEKGIKLQGIASLYRTNITEIFTTSTVDKYDIYDLLFTESIKVRVIDVDLNDYSITLQVRLPLLTRLLNTQIYKVDSISYNIQNREWYIPLPSHIMTKGAFLGGADVKECIEAFSSYICPSDPGFVLNHEMESCLSGNISQCPRTTVTSDIVPRYAFVNGGVVANCITTTCTCNGIGNRINQPPDQGVKIITHKECNTIGINGMLFNTNKEGTLAFYTPDDITLNNSVALNPIDISIELNKAKSDLEESKEWIRRSNQKLDSIEDKIEEILSKIYHIENEIARIKKLIGEAEPEA

SEQ ID NO: 7 - protein, 516 aa, Artificial Sequence
  PIV191489
MPISILLIITTMIMASHCQIDITKLQHVGVLVNSPKGMKISQNFETRYLILSLIPKIEDSNSCGDQQIKQYKRLLDRLIIPLYDGLRLQKDVIVTNQESNENTDPRTERFFGGVIGTIALGVATSAQITAAVALVEAKQARSDIEKLKEAIRDTNKAVQSVQSSPGNLIVAIKSVQDYVNKEIVPCIARLGCEACGLLLGIALTQHYSELTNIFGDNIGSLQEKGIKLQGIASLYRTNITEIFTTSTVDKYDIYDLLFTESIKVRVIDVDLNDYSITLQVRLPLLTRLLNTQIYKVDSISYNIQNREWYIPLPSHIMTKGAFLGGADVKECIEAFSSYICPSDPGFVLNHEMESCLSGNISQCPRTTVTSDIVPRYAFVNGGVVANCITTTCTCNGIGNRINQPPDQGVKIITHKECNTIGINGMLFNTNKEGTLAFYTPDDITLNNSVALNPIDISIELNKAKSDLEESKEWIRRSNQKLDSIEDKIEEILSKIYHIENEIARIKKLIGEAEPEA

SEQ ID NO: 8 - protein, 516 aa, Artificial Sequence
  PIV191501
MPISILLIITTMIMASHCQIDITKLQHVGVLVNSPKGMKISQNFETRYLILSLIPKIEDSNSCGDQQIKQYKRLLDRLIIPLYDGLRLMKDVIVTNQESNENTDPRTERFFGGVIGTIALGVATSAQITAAVALVEAKQARSDIEKLKEAIRDTNKAVQSVQSSVGNLIVAIKSVQDYVNKEIVPSIARLGCEAAGLQLGIALTQHYSELTNIFGDNIGSLIEKGIKLQGIASLYRTNITEIFTTSTVDKYDIYDLLFTESIKVRVIDVDLNDYSITLQVRLPLLTRLLNTQIYKVDSISYNIQNREWYIPLPSHIMTKGAFLGGADVKECIEAFSSYICPSDPGFVLNHEMESCLSGNISQCPRTTVTSDIVPRYAFVNGGVVANCITTTCTCNGIGNRINQPPDQGVKIITHKECNTIGINGMLFNTNKEGTLAFYTPDDITLNNSVALNPIDISIELNKAKSDLEESKEWIRRSNQKLDSIEDKIEEILSKIYHIENEIARIKKLIGEAEPEA

SEQ ID NO: 9 - protein, 491 aa, Artificial Sequence
  PIV191523
MPISILLIITTMIMASHCQIDITKLQHVGVLVNSPKGMKISQNFETRYLILSLIPKIEDSNSCGDQQIKQYKRLLDRLIIPLYDGLRLQKDVIVTNQESNENTDPRTERFFGGVIGTIALGVATSAQITAAVALVEAKQARSDIEKLKEAIRDTNKAVQSVQSSPGNLIVAIKSVQDYVNKEIVPCIARLGCEACGLQLGIALTQHYSELTNIFGDNIGSLQEKGIKLQGIASLYRTNITEIFTTSTVDKYDIYDLLFTESIKVRVIDVDLNDYSITLQVRLPLLTRLLNTQIYKVDSISYNIQNREWYIPLPSHIMTKGAFLGGADVKECIEAFSSYICPSDPGFVLNHEMESCLSGNISQCPRTTVTSDIVPRYAFVNGGVVANCITTTCTCNGIGNRINQPPDQGVKIITHKECNTIGINGMLFNTNKEGTLAFYTPDDITLNNSVALNPIDVSIELNKVKSDLEEVKEWLRRVNQKLDSIGSGEPEA

SEQ ID NO: 10 - protein, 491 aa, Artificial Sequence
  PIV191528
MPISILLIITTMIMASHCQIDITKLQHVGVLVNSPKGMKISQNFETRYLILSLIPKIEDSNSCGDQQIKQYKRLLDRLIIPLYDGLRLQKDVIVTNQESNENTDPRTERFFGGVIGTIALGVATSAQITAAVALVEAKQARSDIEKLKEAIRDTNKAVQSVQSSPGNLIVAIKSVQDYVNKEIVPCIARLGCEACGLQLGIALTQHYSELTNIFGDNIGSLQEKGIKLQGIASLYRTNITEIFTTSTVDKYDIYDLLFTESIKVRVIDVDLNDYSITLQVRLPLLTRLLNTQIYKVDSISYNIQNREWYIPLPSHIMTKGAFLGGADVKECIEAFSSYICPSDPGFVLNHEMESCLSGNISQCPRTTVTSDIVPRYAFVNGGVVANCITTTCTCNGIGNRINQPPDQGVKIITHKECNTIGINGMLFNTNKEGTLAFYTPDDITLNNSVALNPIDVSIELNKVKSKLEDVKEWLRRVNQKLDSIGSGEPEA

SEQ ID NO: 11 - protein, 491 aa, Artificial Sequence
  PIV191530
MPISILLIITTMIMASHCQIDITKLQHVGVLVNSPKGMKISQNFETRYLILSLIPKIEDSNSCGDQQIKQYKRLLDRLIIPLYDGLRLQKDVIVTNQESNENTDPRTERFFGGVIGTIALGVATSAQITAAVALVEAKQARSDIEKLKEAIRDTNKAVQSVQSSPGNLIVAIKSVQDYVNKEIVPCIARLGCEACGLQLGIALTQHYSELTNIFGDNIGSLQEKGIKLQGIASLYRTNITEIFTTSTVDKYDIYDLLFTESIKVRVIDVDLNDYSITLQVRLPLLTRLLNTQIYKVDSISYNIQNREWYIPLPSHIMTKGAFLGGADVKECIEAFSSYICPSDPGFVLNHEMESCLSGNISQCPRTTVTSDIVPRYAFVNGGVVANCITTTCTCNGIGNRINQPPDQGVKIITHKECNTIGINGMLFNTNKEGTLAFYTPDDITLNNSVALNPIDISIELNKVKSDLEEVKEWLRRVNQKLDSIGSGEPEA

SEQ ID NO: 12 - protein, 491 aa, Artificial Sequence
  PIV191531
MPISILLIITTMIMASHCQIDITKLQHVGVLVNSPKGMKISQNFETRYLILSLIPKIEDSNSCGDQQIKQYKRLLDRLIIPLYDGLRLQKDVIVTNQESNENTDPRTERFFGGVIGTIALGVATSAQITAAVALVEAKQARSDIEKLKEAIRDTNKAVQSVQSSPGNLIVAIKSVQDYVNKEIVPCIARLGCEACGLQLGIALTQHYSELTNIFGDNIGSLQEKGIKLQGIASLYRTNITEIFTTSTVDKYDIYDLLFTESIKVRVIDVDLNDYSITLQVRLPLLTRLLNTQIYKVDSISYNIQNREWYIPLPSHIMTKGAFLGGADVKECIEAFSSYICPSDPGFVLNHEMESCLSGNISQCPRTTVTSDIVPRYAFVNGGVVANCITTTCTCNGIGNRINQPPDQGVKIITHKECNTIGINGMLFNTNKEGTLAFYTPDDITLNNSVALNPIDISIELNKIKSDLEEIKEWLRRVNQKLDSIGSGEPEA

SEQ ID NO: 13 - protein, 516 aa, Artificial Sequence
  PIV191551
MPISILLIITTMIMASHCQIDITKLQHVGVLVNSPKGMKISQNFETRYLILSLIPKIEDSNSCGDQQIKQYKRLLDRLIIPLYDGLRLQKDVIVTNQESNENTDPRTERFFGGVIGTIALGVATSAQITAAVALVEAKQARSDIEKLKEAIRDTNKAVQSVQSSVGNLIVAIKSVQDYVNKEIVPSIARLGCEAAGLQLGIALTQHYSELTNIFGDNIGSLQEKGIKLQGIASLYRTNITEIFTTSTVDKYDIYDLLFTESIKVRVIDVDLNDYSITLQVRLPLLTRLLNTQIYKVDSISYNIQNREWYIPLPSHIMTKGAFLGGADVKECIEAPSSYICPSDPGFVLNHEMESCLSGNISQCPRTTVTSDIVPRYAFVNGGVVANCITTTCTCNGIGNRINQPPDQGVKIITHKECNTIGINGMLFNTNKEGTLAFYTPDDITLNNSVALNPIDISIELNKAKSDLEESKEWIRRSNQKLDSIEDKIEEILSKIYHIENEIARIKKLIGEAEPEA

SEQ ID NO: 14 - protein, 516 aa, Artificial Sequence
  PIV191557
MPISILLIITTMIMASHCQIDITKLQHVGVLVNSPKGMKISQNFETRYLILSLIPKIEDSNSCGDQQIKQYKRLLDRLIIPLYDGLRLQKDVIVTNQESNENTDPRTERFFGGVIGTIALGVATSAQITAAVALVEAKQARSDIEKLKEAIRDTNKAVQSVQSSVGNPIVAIKSVQDYVNKEIVPSIARLGCEAAGLQLGIALTQHYSELTNIFGDNIGSLQEKGIKLQGIASLYRTNITEIFTTSTVDKYDIYDLLFTESIKVRVIDVDLNDYSITLQVRLPLLTRLLNTQIYKVDSISYNIQNREWYIPLPSHIMTKGAFLGGADVKECIEAFSSYICPSDPGFVLNHEMESCLSGNISQCPRTTVTSDIVPRYAFVNGGVVANCITTTCTCNGIGNRINQPPDQGVKIITHKECNTIGINGMLFNTNKEGTLAFYTPDDITLNNSVALNPIDISIELNKAKSDLEESKEWIRRSNQKLDSIEDKIEEILSKIYHIENEIARIKKLIGEAEPEA

SEQ ID NO: 15 - protein, 516 aa, Artificial Sequence
  PIV191560
MPISILLIITTMIMASHCQIDITKLQHVGVLVNSPKGMKISQNFETRYLILSLIPKIEDSNSCGDQQIKQYKRLLDRLIIPLYDGLRLQKDVIVTNQESNENTDPRTERFFGGVIGTIALGVATSAQITAAVALVEAKQARSDIEKLKEAIRDTNKAVQSVQSSVGPLIVAIKSVQDYVNKEIVPSIARLGCEAAGLQLGIALTQHYSELTNIFGDNIGSLQEKGIKLQGIASLYRTNITEIFTTSTVDKYDIYDLLFTESIKVRVIDVDLNDYSITLQVRLPLLTRLLNTQIYKVDSISYNIQNREWYIPLPSHIMTKGAFLGGADVKECIEAFSSYICPSDPGFVLNHEMESCLSGNISQCPRTTVTSDIVPRYAFVNGGVVANCITTTCTCNGIGNRINQPPDQGVKIITHKECNTIGINGMLFNTNKEGTLAFYTPDDITLNNSVALNPIDISIELNKAKSDLEESKEWIRRSNQKLDSIEDKIEEILSKIYHIENEIARIKKLIGEAEPEA

SEQ ID NO: 16 - protein, 516 aa, Artificial Sequence
  PIV191561
MPISILLIITTMIMASHCQIDITKLQHVGVLVNSPKGMKISQNFETRYLILSLIPKIEDSNSCGDQQIKQYKRLLDRLIIPLYDCLRLQKDVIVTNQESNENTDPRTERFFGGVIGTIALGVATSAQITAAVALVEAKQARSDIEKLKEAIRDTNKAVQSVQSSVGNLIVAIKSVQDYVNKEIVPSIARLGCEAAGLQLGIALTQHYSELTNIFGDNIGSCQEKGIKLQGIASLYRTNITEIFTTSTVDKYDIYDLLFTESIKVRVIDVDLNDYSITLQVRLPLLTRLLNTQIYKVDSISYNIQNREWYIPLPSHIMTKGAFLGGADVKECIEAFSSYICPSDPGFVLNHEMESCLSGNISQCPRTTVTSDIVPRYAFVNGGVVANCITTTCTCNGIGNRINQPPDQGVKIITHKECNTIGINGMLFNTNKEGTLAFYTPDDITLNNSVALNPIDISIELNKAKSDLEESKEWIRRSNQKLDSIEDKIEEILSKIYHIENEIARIKKLIGEAEPEA

SEQ ID NO: 17 - protein, 516 aa, Artificial Sequence
  PIV191580
MPISILLIITTMIMASHCQIDITKLQHVGVLVNSPKGMKIPQNFETRYLILSLIPKIEDSNSCGDQQIKQYKRLLDRLIIPLYDGLRLQKDVIVTNQESNENTDPRTERFFGGVIGTIALGVATSAQITAAVALVEAKQARSDIEKLKEAIRDTNKAVQSVQSSVGNLIVAIKSVQDYVNKEIVPSIARLGCEAAGLQLGIALTQHYSELTNIFGDNIGSLQEKGIKLQGIASLYRTNITEIFTTSTVDKYDIYDLLFTESIKVRVIDVDLNDYSITLQVRLPLLTRLLNTQIYKVDSISYNIQNREWYIPLPSHIMTKGAFLGGADVKECIEAFSSYICPSDPGFVLNHEMESCLSGNISQCPRTTVTSDIVPRYAFVNGGVVANCITTTCTCNGIGNRINQPPDQGVKIITHKECNTIGINGMLFNTNKEGTLAFYTPDDITLNNSVALNPIDISIELNKAKSDLEESKEWIRRSNQKLDSIEDKIEEILSKIYHIENEIARIKKLIGEAEPEA

SEQ ID NO: 18 - protein, 491 aa, Artificial Sequence
  PIV191593
MPISILLIITTMIMASHCQIDITKLQHVGVLVNSPKGMKISQNFETRYLILSLIPKIEDSNSCGDQQIKQYKRLLDRLIIPLYDGLRLQKDVIVTNQESNENTDPRTERFFGGVIGTIALGVATSAQITAAVALVEAKQARSDIEKLKEAIRDTNKAVQSVQSSPGNLIVAIKSVQDYVNKEIVPCIARLGCEACGLQLGIALTQHYSELTNIFGDNIGSLQEKGIKLQGIASLYRTNITEIFTTSTVDKYDIYDLLFTESIKVRVIDVDLNDYSITLQVRLPLLTRLLNTQIYKVDSISYNIQNREWYIPLPSHIMTKGAFLGGADVKECIEAFSSYICPSDPGFVLNHEMESCLSGNISQCPRTTVTSDIVPRYAFVNGGVVANCITTTCTCNGIGNRINQPPDQGVKIITHKECNTIGINGMLFNTNKEGTLAFYTPDDITLNNSVALDPIDISIELNKAKSDLEESKEWIRRSNQKLDSIGSGEPEA

SEQ ID NO: 19 - protein, 491 aa, Artificial Sequence
  PIV191594
MPISILLIITTMIMASHCQIDITKLQHVGVLVNSPKGMKISQNFETRYLILSLIPKIEDSNSCGDQQIKQYKRLLDRLIIPLYDGLRLQKDVIVTNQESNENTDPRTERFFGGVIGTIALGVATSAQITAAVALVEAKQARSDIEKLKEAIRDTNKAVQSVQSSPGNLIVAIKSVQDYVNKEIVPCIARLGCEACGLQLGIALTQHYSELTNIFGDNIGSLQEKGIKLQGIASLYRTNITEIFTTSTVDKYDIYDLLFTESIKVRVIDVDLNDYSITLQVRLPLLTRLLNTQIYKVDSISYNIQNREWYIPLPSHIMTKGAFLGGADVKECIEAFSSYICPSDPGFVLNHEMESCLSGNISQCPRTTVTSDIVPRYAFVNGGVVANCITTTCTCNGIGNRINQPPDQGVKIITHKECNTIGINGMLFNTNKEGTLAFYTPDDITLNNSVALNPIDISIELNKAKSDLEESKEWIRRSNQKLDSIGSGEPEA

SEQ ID NO: 20 - protein, 516 aa, Artificial Sequence
  PIV200253
MPISILLIITTMIMASHCQIDITKLQHVGVLVNSPKGMKIPQNFETRYLILSLIPKIEDSNSCGDQQIKQYKRLLDRLIIPLYDGLRLQKDVIVTNQESNENTDPRTERFFGGVIGTIALGVATSAQITAAVALVEAKQARSDIEKLKEAIRDTNKAVQSVQSSVGPLIVAIKSVQDYVNKEIVPSIARLGCEAAGLQLGIALTQHYSELTNIFGDNIGSLQEKGIKLQGIASLYRTNITEIFTTSTVDKYDIYDLLFTESIKVRVIDVDLNDYSITLQVRLPLLTRLLNTQIYKVDSISYNIQNREWYIPLPSHIMTKGAFLGGADVKECIEAFSSYICPSDPGFVLNHEMESCLSGNISQCPRTTVTSDIVPRYAFVNGGVVANCITTTCTCNGIGNRINQPPDQGVKIITHKECNTIGINGMLFNTNKEGTLAFYTPDDITLNNSVALNPIDISIELNKAKSDLEESKEWIRRSNQKLDSIEDKIEEILSKIYHIENEIARIKKLIGEAEPEA

SEQ ID NO: 21 - protein, 516 aa, Artificial Sequence
  PIV200254
MPISILLIITTMIMASHCQIDITKLQHVGVLVNSPKGMKIPQNFETRYLILSLIPKIEDSNSCGDQQIKQYKRLLDRLIIPLYDGLRLQKDVIVTNQESNENTDPRTERFFGGVIGTIALGVATSAQITAAVALVEAKQARSDIEKLKEAIRDTNKAVQSVQSSVGNPIVAIKSVQDYVNKEIVPSIARLGCEAAGLQLGIALTQHYSELTNIFGDNIGSLQEKGIKLQGIASLYRTNITEIFTTSTVDKYDIYDLLFTESIKVRVIDVDLNDYSITLQVRLPLLTRLLNTQIYKVDSISYNIQNREWYIPLPSHIMTKGAFLGGADVKECIEAFSSYICPSDPGFVLNHEMESCLSGNISQCPRTTVTSDIVPRYAFVNGGVVANCITTTCTCNGIGNRINQPPDQGVKIITHKECNTIGINGMLFNTNKEGTLAFYTPDDITLNNSVALNPIDISIELNKAKSDLEESKEWIRRSNQKLDSIEDKIEEILSKIYHIENEIARIKKLIGEAEPEA

SEQ ID NO: 22 - protein, 516 aa, Artificial Sequence
  PIV200255
MPISILLIITTMIMASHCQIDITKLQHVGVLVNSPKGMKIPQNFETRYLILSLIPKIEDSNSCGDQQIKQYKRLLDRLIIPLYDGLRLQKDVIVTNQESNENTDPRTERFFGGVIGTIALGVATSAQITAAVALVEAKQARSDIEKLKEAIRDTNKAVQSVQSSVGNLIVAIKSVQDYVNKEIVPSIARLGCEAAGLQLGIALTQHYSELTNIFGDNIGSLQEKGIKLQGIASLYRTNITEIFTTSTVDKYDIYDLLFTESIKVRVIDVDLNDYSITLQVRLPLLTRLLNTQIYKVDSISYNIQNREWYIPLPSHIMTKGAFLGGADVKECIEAFSSYICPSDPGFVLNHEMESCLSGNISQCPRTTVTSDIVPRYAFVNGGVVANCITTTCTCNGIGNRINQPPDQGVKIITHKECNTIGINGMLFNTNKEGTLPFYTPDDITLNNSVALNPIDISIELNKAKSDLEESKEWIRRSNQKLDSIEDKIEEILSKIYHIENEIARIKKLIGEAEPEA

SEQ ID NO: 23 - protein, 516 aa, Artificial Sequence
  PIV200256
MPISILLIITTMIMASHCQIDITKLQHVGVLVNSPKGMKIPQNFETRYLILSLIPKIEDSNSCGDQQIKQYKRLLDRLIIPLYDGLRLQKDVIVTNQESNENTDPRTERFFGGVIGTIALGVATSAQITAAVALVEAKQARSDIEKLKEAIRDTNKAVQSVQSSVGNLIVAIKSVQDYVNKEIVPSIARLGCEAAGLQLGIALTQHYSELTNIFGDNIGSLQEKGIKLQGIASLYRTNITEIFTTSTVDKYDIYDLLFTESIKVRVIDVDLNDYSITLQVRLPLLTRLLNTQIYKVDSISYNIQNREWYIPLPSHIMTKGAFLGGADVKECIEAPSSYICPSDPGFVLNHEMESCLSGNISQCPRTTVTSDIVPRYAFVNGGVVANCITTTCTCNGIGNRINQPPDQGVKIITHKECNTIGINGMLFNTNKEGTLAFYTPDDITLNNSVALNPIDISIELNKAKSDLEESKEWIRRSNQKLDSIEDKIEEILSKIYHIENEIARIKKLIGEAEPEA

SEQ ID NO: 24 - protein, 516 aa, Artificial Sequence
  PIV200257
MPISILLIITTMIMASHCQIDITKLQHVGVLVNSPKGMKIPQNFETRYLILSLIPKIEDSNSCGDQQIKQYKRLLDRLIIPLYDGLRLQKDVIVTNQESNENTDPRTERFFGGVIGTIALGVATSAQITAAVALVEAKQARSDIEKLKEAIRDTNKAVQSVQSSVGNLIVAIKSVQDYVNKEIVPSIARLGCEAAGLQLGIALTQHYSELTNIFGDNIGSLQEKGIKLQGIASLYRTNITEIFTTSTVDKYDIYDLLFTESIKVRVIDVDLNDYSITLQVRLPLLTRLLNTQIYKVDSISYNIQNREWYIPLPSHIMTKGAFLGGADVKECIEAFSSYICPSDPGFVLNHEMESCLSGNISQCPRTLVTSDIVPRYAFVNGGVVANCITTTCTCNGIGNRINQPPDQGVKIITHKECNTIGINGMLFNTNKEGTLAFYTPDDITLNNSVALNPIDISIELNKAKSDLEESKEWIRRSNQKLDSIEDKIEEILSKIYHIENEIARIKKLIGEAEPEA

SEQ ID NO: 25 - protein, 516 aa, Artificial Sequence
  PIV200258
MPISILLIITTMIMASHCQIDITKLQHVGVLVNSPKGMKIPQNFETRYLILSLIPKIEDSNSCGDQQIKQYKRLLDRLIIPLYDGLRLQKDVIVTNQESNENTDPRTERFFGGVIGTIALGVATSAQITAAVALVEAKQARSDIEKLKEAIRDTNKAVQSVQSSPGNLIVAIKSVQDYVNKEIVPSIARLGCEAAGLQLGIALTQHYSELTNIFGDNIGSLQEKGIKLQGIASLYRTNITEIFTTSTVDKYDIYDLLFTESIKVRVIDVDLNDYSITLQVRLPLLTRLLNTQIYKVDSISYNIQNREWYIPLPSHIMTKGAFLGGADVKECIEAFSSYICPSDPGFVLNHEMESCLSGNISQCPRTTVTSDIVPRYAFVNGGVVANCITTTCTCNGIGNRINQPPDQGVKIITHKECNTIGINGMLFNTNKEGTLAFYTPDDITLNNSVALNPIDISIELNKAKSDLEESKEWIRRSNQKLDSIEDKIEEILSKIYHIENEIARIKKLIGEAEPEA

SEQ ID NO: 26 - protein, 516 aa, Artificial Sequence
  PIV200259
MPISILLIITTMIMASHCQIDITKLQHVGVLVNSPKGMKIPQNFETRYLILSLIPKIEDSNSCGDQQIKQYKRLLDRLIIPLYDGLRLQKDVIVTNQESNENTDPRTERFFGGVIGTIALGVATSAQITAAVALVEAKQARSDIEKLKEAIRDTNKAVQSVQSSVGNLIVAIKSVQDYVNKEIVPSIARLGCEAAGLLLGIALTQHYSELTNIFGDNIGSLQEKGIKLQGIASLYRTNITEIFTTSTVDKYDIYDLLFTESIKVRVIDVDLNDYSITLQVRLPLLTRLLNTQIYKVDSISYNIQNREWYIPLPSHIMTKGAFLGGADVKECIEAFSSYICPSDPGFVLNHEMESCLSGNISQCPRTTVTSDIVPRYAFVNGGVVANCITTTCTCNGIGNRINQPPDQGVKIITHKECNTIGINGMLFNTNKEGTLAFYTPDDITLNNSVALNPIDISIELNKAKSDLEESKEWIRRSNQKLDSIEDKIEEILSKIYHIENEIARIKKLIGEAEPEA

SEQ ID NO: 27 - protein, 516 aa, Artificial Sequence
  PIV200260
MPISILLIITTMIMASHCQIDITKLQHVGVLVNSPKGMKIPQNFETRYLILSLIPKIEDSNSCGDQQIKQYKRLLDRLIIPLYDGLRLQKDVIVTNQESNENTDPRTERFFGGVIGTIALGVATSAQITAAVALVEAKQARSDIEKLKEAIRDTNKAVQSVQSSVGNLIVAIKSVQDYVNKEIVPSIARLGCEAAGLQLGIALDQHYSELTNIFGDNIGSLQEKGIKLQGIASLYRTNITEIFTTSTVDKYDIYDLLFTESIKVRVIDVDLNDYSITLQVRLPLLTRLLNTQIYKVDSISYNIQNREWYIPLPSHIMTKGAFLGGADVKECIEAFSSYICPSDPGFVLNHEMESCLSGNISQCPRTTVTSDIVPRYAFVNGGVVANCITTTCTCNGIGNRINQPPDQGVKIITHKECNTIGINGMLFNTNKEGTLAFYTPDDITLNNSVALNPIDISIELNKAKSDLEESKEWIRRSNQKLDSIEDKIEEILSKIYHIENEIARIKKLIGEAEPEA

SEQ ID NO: 28 - protein, 516 aa, Artificial Sequence
  PIV200261
MPISILLIITTMIMASHCQIDITKLQHVGVLVNSPKGCKIPQNFETRYLILSLIPKIEDSNSCGDQQIKQYKRLLDRLIIPLYDGLRLQKDVIVTNQESNENTDPRTERFFGGVIGTIALGVATSAQITAAVALVEAKQARSDIEKLKEAIRDTNKAVQSVQSSVGNLIVAIKSVQDYVNKEIVPSIARLGCEAAGLQLGIALTQHYSELTNIFGDNIGSLQEKGIKLQGIASLYRTNITEIFTTSTVDKYDIYDLLFTESIKVRVIDVDLNDYSITLQVRLPLLTRLLNCQIYKVDSISYNIQNREWYIPLPSHIMTKGAFLGGADVKECIEAFSSYICPSDPGFVLNHEMESCLSGNISQCPRTTVTSDIVPRYAFVNGGVVANCITTTCTCNGIGNRINQPPDQGVKIITHKECNTIGINGMLFNTNKEGTLAFYTPDDITLNNSVALNPIDISIELNKAKSDLEESKEWIRRSNQKLDSIEDKIEEILSKIYHIENEIARIKKLIGEAEPEA

SEQ ID NO: 29 - protein, 516 aa, Artificial Sequence
  PIV200262
MPISILLIITTMIMASHCQIDITKLQHVGVLVNSPKGCKISQNFETRYLILSLIPKIEDSNSCGDQQIKQYKRLLDRLIIPLYDGLRLQKDVIVTNQESNENTDPRTERFFGGVIGTIALGVATSAQITAAVALVEAKQARSDIEKLKEAIRDTNKAVQSVQSSVGPLIVAIKSVQDYVNKEIVPSIARLGCEAAGLQLGIALTQHYSELTNIFGDNIGSLQEKGIKLQGIASLYRTNITEIFTTSTVDKYDIYDLLFTESIKVRVIDVDLNDYSITLQVRLPLLTRLLNCQIYKVDSISYNIQNREWYIPLPSHIMTKGAFLGGADVKECIEAFSSYICPSDPGFVLNHEMESCLSGNISQCPRTTVTSDIVPRYAFVNGGVVANCITTTCTCNGIGNRINQPPDQGVKIITHKECNTIGINGMLFNTNKEGTLAFYTPDDITLNNSVALNPIDISIELNKAKSDLEESKEWIRRSNQKLDSIEDKIEEILSKIYHIENEIARIKKLIGEAEPEA

SEQ ID NO: 30 - protein, 516 aa, Artificial Sequence
  PIV200263
MPISILLIITTMIMASHCQIDITKLQHVGVLVNSPKGCKISQNFETRYLILSLIPKIEDSNSCGDQQIKQYKRLLDRLIIPLYDGLRLQKDVIVTNQESNENTDPRTERFFGGVIGTIALGVATSAQITAAVALVEAKQARSDIEKLKEAIRDTNKAVQSVQSSVGNPIVAIKSVQDYVNKEIVPSIARLGCEAAGLQLGIALTQHYSELTNIFGDNIGSLQEKGIKLQGIASLYRTNITEIFTTSTVDKYDIYDLLFTESIKVRVIDVDLNDYSITLQVRLPLLTRLLNCQIYKVDSISYNIQNREWYIPLPSHIMTKGAFLGGADVKECIEAFSSYICPSDPGFVLNHEMESCLSGNISQCPRTTVTSDIVPRYAFVNGGVVANCITTTCTCNGIGNRINQPPDQGVKIITHKECNTIGINGMLFNTNKEGTLAFYTPDDITLNNSVALNPIDISIELNKAKSDLEESKEWIRRSNQKLDSIEDKIEEILSKIYHIENEIARIKKLIGEAEPEA

SEQ ID NO: 31 - protein, 516 aa, Artificial Sequence
  PIV200264
MPISILLIITTMIMASHCQIDITKLQHVGVLVNSPKGCKISQNFETRYLILSLIPKIEDSNSCGDQQIKQYKRLLDRLIIPLYDGLRLQKDVIVTNQESNENTDPRTERFFGGVIGTIALGVATSAQITAAVALVEAKQARSDIEKLKEAIRDTNKAVQSVQSSVGNLIVAIKSVQDYVNKEIVPSIARLGCEAAGLQLGIALTQHYSELTNIFGDNIGSLQEKGIKLQGIASLYRTNITEIFTTSTVDKYDIYDLLFTESIKVRVIDVDLNDYSITLQVRLPLLTRLLNCQIYKVDSISYNIQNREWYIPLPSHIMTKGAFLGGADVKECIEAFSSYICPSDPGFVLNHEMESCLSGNISQCPRTTVTSDIVPRYAFVNGGVVANCITTTCTCNGIGNRINQPPDQGVKIITHKECNTIGINGMLFNTNKEGTLPFYTPDDITLNNSVALNPIDISIELNKAKSDLEESKEWIRRSNQKLDSIEDKIEEILSKIYHIENEIARIKKLIGEAEPEA

SEQ ID NO: 32 - protein, 516 aa, Artificial Sequence
  PIV200265
MPISILLIITTMIMASHCQIDITKLQHVGVLVNSPKGCKISQNFETRYLILSLIPKIEDSNSCGDQQIKQYKRLLDRLIIPLYDGLRLQKDVIVTNQESNENTDPRTERFFGGVIGTIALGVATSAQITAAVALVEAKQARSDIEKLKEAIRDTNKAVQSVQSSVGNLIVAIKSVQDYVNKEIVPSIARLGCEAAGLQLGIALTQHYSELTNIFGDNIGSLQEKGIKLQGIASLYRTNITEIFTTSTVDKYDIYDLLFTESIKVRVIDVDLNDYSITLQVRLPLLTRLLNCQIYKVDSISYNIQNREWYIPLPSHIMTKGAFLGGADVKECIEAPSSYICPSDPGFVLNHEMESCLSGNISQCPRTTVTSDIVPRYAFVNGGVVANCITTTCTCNGIGNRINQPPDQGVKIITHKECNTIGINGMLFNTNKEGTLAFYTPDDITLNNSVALNPIDISIELNKAKSDLEESKEWIRRSNQKLDSIEDKIEEILSKIYHIENEIARIKKLIGEAEPEA

SEQ ID NO: 33 - protein, 516 aa, Artificial Sequence
  PIV200266
MPISILLIITTMIMASHCQIDITKLQHVGVLVNSPKGCKISQNFETRYLILSLIPKIEDSNSCGDQQIKQYKRLLDRLIIPLYDGLRLQKDVIVTNQESNENTDPRTERFFGGVIGTIALGVATSAQITAAVALVEAKQARSDIEKLKEAIRDTNKAVQSVQSSVGNLIVAIKSVQDYVNKEIVPSIARLGCEAAGLQLGIALTQHYSELTNIFGDNIGSLQEKGIKLQGIASLYRTNITEIFTTSTVDKYDIYDLLFTESIKVRVIDVDLNDYSITLQVRLPLLTRLLNCQIYKVDSISYNIQNREWYIPLPSHIMTKGAFLGGADVKECIEAFSSYICPSDPGFVLNHEMESCLSGNISQCPRTLVTSDIVPRYAFVNGGVVANCITTTCTCNGIGNRINQPPDQGVKIITHKECNTIGINGMLFNTNKEGTLAFYTPDDITLNNSVALNPIDISIELNKAKSDLEESKEWIRRSNQKLDSIEDKIEEILSKIYHIENEIARIKKLIGEAEPEA

SEQ ID NO: 34 - protein, 516 aa, Artificial Sequence
  PIV200267
MPISILLIITTMIMASHCQIDITKLQHVGVLVNSPKGCKISQNFETRYLILSLIPKIEDSNSCGDQQIKQYKRLLDRLIIPLYDGLRLQKDVIVTNQESNENTDPRTERFFGGVIGTIALGVATSAQITAAVALVEAKQARSDIEKLKEAIRDTNKAVQSVQSSPGNLIVAIKSVQDYVNKEIVPSIARLGCEAAGLQLGIALTQHYSELTNIFGDNIGSLQEKGIKLQGIASLYRTNITEIFTTSTVDKYDIYDLLFTESIKVRVIDVDLNDYSITLQVRLPLLTRLLNCQIYKVDSISYNIQNREWYIPLPSHIMTKGAFLGGADVKECIEAFSSYICPSDPGFVLNHEMESCLSGNISQCPRTTVTSDIVPRYAFVNGGVVANCITTTCTCNGIGNRINQPPDQGVKIITHKECNTIGINGMLFNTNKEGTLAFYTPDDITLNNSVALNPIDISIELNKAKSDLEESKEWIRRSNQKLDSIEDKIEEILSKIYHIENEIARIKKLIGEAEPEA

SEQ ID NO: 35 - protein, 516 aa, Artificial Sequence
  PIV200268
MPISILLIITTMIMASHCQIDITKLQHVGVLVNSPKGCKISQNFETRYLILSLIPKIEDSNSCGDQQIKQYKRLLDRLIIPLYDGLRLQKDVIVTNQESNENTDPRTERFFGGVIGTIALGVATSAQITAAVALVEAKQARSDIEKLKEAIRDTNKAVQSVQSSVGNLIVAIKSVQDYVNKEIVPSIARLGCEAAGLLLGIALTQHYSELTNIFGDNIGSLQEKGIKLQGIASLYRTNITEIFTTSTVDKYDIYDLLFTESIKVRVIDVDLNDYSITLQVRLPLLTRLLNCQIYKVDSISYNIQNREWYIPLPSHIMTKGAFLGGADVKECIEAFSSYICPSDPGFVLNHEMESCLSGNISQCPRTTVTSDIVPRYAFVNGGVVANCITTTCTCNGIGNRINQPPDQGVKIITHKECNTIGINGMLFNTNKEGTLAFYTPDDITLNNSVALNPIDISIELNKAKSDLEESKEWIRRSNQKLDSIEDKIEEILSKIYHIENEIARIKKLIGEAEPEA

SEQ ID NO: 36 - protein, 516 aa, Artificial Sequence
  PIV200269
MPISILLIITTMIMASHCQIDITKLQHVGVLVNSPKGCKISQNFETRYLILSLIPKIEDSNSCGDQQIKQYKRLLDRLIIPLYDGLRLQKDVIVTNQESNENTDPRTERFFGGVIGTIALGVATSAQITAAVALVEAKQARSDIEKLKEAIRDTNKAVQSVQSSVGNLIVAIKSVQDYVNKEIVPSIARLGCEAAGLQLGIALDQHYSELTNIFGDNIGSLQEKGIKLQGIASLYRTNITEIFTTSTVDKYDIYDLLFTESIKVRVIDVDLNDYSITLQVRLPLLTRLLNCQIYKVDSISYNIQNREWYIPLPSHIMTKGAFLGGADVKECIEAFSSYICPSDPGFVLNHEMESCLSGNISQCPRTTVTSDIVPRYAFVNGGVVANCITTTCTCNGIGNRINQPPDQGVKIITHKECNTIGINGMLFNTNKEGTLAFYTPDDITLNNSVALNPIDISIELNKAKSDLEESKEWIRRSNQKLDSIEDKIEEILSKIYHIENEIARIKKLIGEAEPEA

SEQ ID NO: 37 - protein, 516 aa, Artificial Sequence
  PIV200270
MPISILLIITTMIMASHCQIDITKLQHVGVLVNSPKGMKIPQNFETRYLILSLIPKIEDSNSCGDQQIKQYKRLLDRLIIPLYDCLRLQKDVIVTNQESNENTDPRTERFFGGVIGTIALGVATSAQITAAVALVEAKQARSDIEKLKEAIRDTNKAVQSVQSSVGNLIVAIKSVQDYVNKEIVPSIARLGCEAAGLQLGIALTQHYSELTNIFGDNIGSCQEKGIKLQGIASLYRTNITEIFTTSTVDKYDIYDLLFTESIKVRVIDVDLNDYSITLQVRLPLLTRLLNTQIYKVDSISYNIQNREWYIPLPSHIMTKGAFLGGADVKECIEAFSSYICPSDPGFVLNHEMESCLSGNISQCPRTTVTSDIVPRYAFVNGGVVANCITTTCTCNGIGNRINQPPDQGVKIITHKECNTIGINGMLFNTNKEGTLAFYTPDDITLNNSVALNPIDISIELNKAKSDLEESKEWIRRSNQKLDSIEDKIEEILSKIYHIENEIARIKKLIGEAEPEA

SEQ ID NO: 38 - protein, 516 aa, Artificial Sequence
  PIV200271
MPISILLIITTMIMASHCQIDITKLQHVGVLVNSPKGCKISQNFETRYLILSLIPKIEDSNSCGDQQIKQYKRLLDRLIIPLYDCLRLQKDVIVTNQESNENTDPRTERFFGGVIGTIALGVATSAQITAAVALVEAKQARSDIEKLKEAIRDTNKAVQSVQSSVGNLIVAIKSVQDYVNKEIVPSIARLGCEAAGLQLGIALTQHYSELTNIFGDNIGSCQEKGIKLQGIASLYRTNITEIFTTSTVDKYDIYDLLFTESIKVRVIDVDLNDYSITLQVRLPLLTRLLNCQIYKVDSISYNIQNREWYIPLPSHIMTKGAFLGGADVKECIEAFSSYICPSDPGFVLNHEMESCLSGNISQCPRTTVTSDIVPRYAFVNGGVVANCITTTCTCNGIGNRINQPPDQGVKIITHKECNTIGINGMLFNTNKEGTLAFYTPDDITLNNSVALNPIDISIELNKAKSDLEESKEWIRRSNQKLDSIEDKIEEILSKIYHIENEIARIKKLIGEAEPEA

SEQ ID NO: 39 - protein, 516 aa, Artificial Sequence
  PIV200272
MPISILLIITTMIMASHCQIDITKLQHVGVLVNSPKGMKISQNFETRYLILSLIPKIEDSNSCGDQQIKQYKRLLDRLIIPLYDCLRLQKDVIVTNQESNENTDPRTERFFGGVIGTIALGVATSAQITAAVALVEAKQARSDIEKLKEAIRDTNKAVQSVQSSVGPLIVAIKSVQDYVNKEIVPSIARLGCEAAGLQLGIALTQHYSELTNIFGDNIGSCQEKGIKLQGIASLYRTNITEIFTTSTVDKYDIYDLLFTESIKVRVIDVDLNDYSITLQVRLPLLTRLLNTQIYKVDSISYNIQNREWYIPLPSHIMTKGAFLGGADVKECIEAFSSYICPSDPGFVLNHEMESCLSGNISQCPRTTVTSDIVPRYAFVNGGVVANCITTTCTCNGIGNRINQPPDQGVKIITHKECNTIGINGMLFNTNKEGTLAFYTPDDITLNNSVALNPIDISIELNKAKSDLEESKEWIRRSNQKLDSIEDKIEEILSKIYHIENEIARIKKLIGEAEPEA

SEQ ID NO: 40 - protein, 516 aa, Artificial Sequence
  PIV200273
MPISILLIITTMIMASHCQIDITKLQHVGVLVNSPKGMKISQNFETRYLILSLIPKIEDSNSCGDQQIKQYKRLLDRLIIPLYDCLRLQKDVIVTNQESNENTDPRTERFFGGVIGTIALGVATSAQITAAVALVEAKQARSDIEKLKEAIRDTNKAVQSVQSSVGNPIVAIKSVQDYVNKEIVPSIARLGCEAAGLQLGIALTQHYSELTNIFGDNIGSCQEKGIKLQGIASLYRTNITEIFTTSTVDKYDIYDLLFTESIKVRVIDVDLNDYSITLQVRLPLLTRLLNTQIYKVDSISYNIQNREWYIPLPSHIMTKGAFLGGADVKECIEAFSSYICPSDPGFVLNHEMESCLSGNISQCPRTTVTSDIVPRYAFVNGGVVANCITTTCTCNGIGNRINQPPDQGVKIITHKECNTIGINGMLFNTNKEGTLAFYTPDDITLNNSVALNPIDISIELNKAKSDLEESKEWIRRSNQKLDSIEDKIEEILSKIYHIENEIARIKKLIGEAEPEA

SEQ ID NO: 41 - protein, 516 aa, Artificial Sequence
  PIV200274
MPISILLIITTMIMASHCQIDITKLQHVGVLVNSPKGMKISQNFETRYLILSLIPKIEDSNSCGDQQIKQYKRLLDRLIIPLYDCLRLQKDVIVTNQESNENTDPRTERFFGGVIGTIALGVATSAQITAAVALVEAKQARSDIEKLKEAIRDTNKAVQSVQSSVGNLIVAIKSVQDYVNKEIVPSIARLGCEAAGLQLGIALTQHYSELTNIFGDNIGSCQEKGIKLQGIASLYRTNITEIFTTSTVDKYDIYDLLFTESIKVRVIDVDLNDYSITLQVRLPLLTRLLNTQIYKVDSISYNIQNREWYIPLPSHIMTKGAFLGGADVKECIEAFSSYICPSDPGFVLNHEMESCLSGNISQCPRTTVTSDIVPRYAFVNGGVVANCITTTCTCNGIGNRINQPPDQGVKIITHKECNTIGINGMLFNTNKEGTLPFYTPDDITLNNSVALNPIDISIELNKAKSDLEESKEWIRRSNQKLDSIEDKIEEILSKIYHIENEIARIKKLIGEAEPEA

SEQ ID NO: 42 - protein, 516 aa, Artificial Sequence
  PIV200275
MPISILLIITTMIMASHCQIDITKLQHVGVLVNSPKGMKISQNFETRYLILSLIPKIEDSNSCGDQQIKQYKRLLDRLIIPLYDCLRLQKDVIVTNQESNENTDPRTERFFGGVIGTIALGVATSAQITAAVALVEAKQARSDIEKLKEAIRDTNKAVQSVQSSVGNLIVAIKSVQDYVNKEIVPSIARLGCEAAGLQLGIALTQHYSELTNIFGDNIGSCQEKGIKLQGIASLYRTNITEIFTTSTVDKYDIYDLLFTESIKVRVIDVDLNDYSITLQVRLPLLTRLLNTQIYKVDSISYNIQNREWYIPLPSHIMTKGAFLGGADVKECIEAPSSYICPSDPGFVLNHEMESCLSGNISQCPRTTVTSDIVPRYAFVNGGVVANCITTTCTCNGIGNRINQPPDQGVKIITHKECNTIGINGMLFNTNKEGTLAFYTPDDITLNNSVALNPIDISIELNKAKSDLEESKEWIRRSNQKLDSIEDKIEEILSKIYHIENEIARIKKLIGEAEPEA

SEQ ID NO: 43 - protein, 516 aa, Artificial Sequence
  PIV200276
MPISILLIITTMIMASHCQIDITKLQHVGVLVNSPKGMKISQNFETRYLILSLIPKIEDSNSCGDQQIKQYKRLLDRLIIPLYDCLRLQKDVIVTNQESNENTDPRTERFFGGVIGTIALGVATSAQITAAVALVEAKQARSDIEKLKEAIRDTNKAVQSVQSSVGNLIVAIKSVQDYVNKEIVPSIARLGCEAAGLQLGIALTQHYSELTNIFGDNIGSCQEKGIKLQGIASLYRTNITEIFTTSTVDKYDIYDLLFTESIKVRVIDVDLNDYSITLQVRLPLLTRLLNTQIYKVDSISYNIQNREWYIPLPSHIMTKGAFLGGADVKECIEAFSSYICPSDPGFVLNHEMESCLSGNISQCPRTLVTSDIVPRYAFVNGGVVANCITTTCTCNGIGNRINQPPDQGVKIITHKECNTIGINGMLFNTNKEGTLAFYTPDDITLNNSVALNPIDISIELNKAKSDLEESKEWIRRSNQKLDSIEDKIEEILSKIYHIENEIARIKKLIGEAEPEA

SEQ ID NO: 44 - protein, 516 aa, Artificial Sequence
  PIV200277
MPISILLIITTMIMASHCQIDITKLQHVGVLVNSPKGMKISQNFETRYLILSLIPKIEDSNSCGDQQIKQYKRLLDRLIIPLYDCLRLQKDVIVTNQESNENTDPRTERFFGGVIGTIALGVATSAQITAAVALVEAKQARSDIEKLKEAIRDTNKAVQSVQSSPGNLIVAIKSVQDYVNKEIVPSIARLGCEAAGLQLGIALTQHYSELTNIFGDNIGSCQEKGIKLQGIASLYRTNITEIFTTSTVDKYDIYDLLFTESIKVRVIDVDLNDYSITLQVRLPLLTRLLNTQIYKVDSISYNIQNREWYIPLPSHIMTKGAFLGGADVKECIEAFSSYICPSDPGFVLNHEMESCLSGNISQCPRTTVTSDIVPRYAFVNGGVVANCITTTCTCNGIGNRINQPPDQGVKIITHKECNTIGINGMLFNTNKEGTLAFYTPDDITLNNSVALNPIDISIELNKAKSDLEESKEWIRRSNQKLDSIEDKIEEILSKIYHIENEIARIKKLIGEAEPEA

SEQ ID NO: 45 - protein, 516 aa, Artificial Sequence
  PIV200278
MPISILLIITTMIMASHCQIDITKLQHVGVLVNSPKGMKISQNFETRYLILSLIPKIEDSNSCGDQQIKQYKRLLDRLIIPLYDCLRLQKDVIVTNQESNENTDPRTERFFGGVIGTIALGVATSAQITAAVALVEAKQARSDIEKLKEAIRDTNKAVQSVQSSVGNLIVAIKSVQDYVNKEIVPSIARLGCEAAGLLLGIALTQHYSELTNIFGDNIGSCQEKGIKLQGIASLYRTNITEIFTTSTVDKYDIYDLLFTESIKVRVIDVDLNDYSITLQVRLPLLTRLLNTQIYKVDSISYNIQNREWYIPLPSHIMTKGAFLGGADVKECIEAFSSYICPSDPGFVLNHEMESCLSGNISQCPRTTVTSDIVPRYAFVNGGVVANCITTTCTCNGIGNRINQPPDQGVKIITHKECNTIGINGMLFNTNKEGTLAFYTPDDITLNNSVALNPIDISIELNKAKSDLEESKEWIRRSNQKLDSIEDKIEEILSKIYHIENEIARIKKLIGEAEPEA

SEQ ID NO: 46 - protein, 516 aa, Artificial Sequence
  PIV200279
MPISILLIITTMIMASHCQIDITKLQHVGVLVNSPKGMKISQNFETRYLILSLIPKIEDSNSCGDQQIKQYKRLLDRLIIPLYDCLRLQKDVIVTNQESNENTDPRTERFFGGVIGTIALGVATSAQITAAVALVEAKQARSDIEKLKEAIRDTNKAVQSVQSSVGNLIVAIKSVQDYVNKEIVPSIARLGCEAAGLQLGIALDQHYSELTNIFGDNIGSCQEKGIKLQGIASLYRTNITEIFTTSTVDKYDIYDLLFTESIKVRVIDVDLNDYSITLQVRLPLLTRLLNTQIYKVDSISYNIQNREWYIPLPSHIMTKGAFLGGADVKECIEAFSSYICPSDPGFVLNHEMESCLSGNISQCPRTTVTSDIVPRYAFVNGGVVANCITTTCTCNGIGNRINQPPDQGVKIITHKECNTIGINGMLFNTNKEGTLAFYTPDDITLNNSVALNPIDISIELNKAKSDLEESKEWIRRSNQKLDSIEDKIEEILSKIYHIENEIARIKKLIGEAEPEA

SEQ ID NO: 47 - protein, 516 aa, Artificial Sequence
  PIV200280
MPISILLIITTMIMASHCQIDITKLQHVGVLVNSPKGMKISQNFETRYLILSLIPKIEDSNSCGDQQIKQYKRLLDRLIIPLYDGLRLQKDVIVTNQESNENTDPRTERFFGGVIGTIALGVATSAQITAAVALVEAKQARSDIEKLKEAIRDTNKAVQSVQSSVGPPIVAIKSVQDYVNKEIVPSIARLGCEAAGLQLGIALTQHYSELTNIFGDNIGSLQEKGIKLQGIASLYRTNITEIFTTSTVDKYDIYDLLFTESIKVRVIDVDLNDYSITLQVRLPLLTRLLNTQIYKVDSISYNIQNREWYIPLPSHIMTKGAFLGGADVKECIEAFSSYICPSDPGFVLNHEMESCLSGNISQCPRTTVTSDIVPRYAFVNGGVVANCITTTCTCNGIGNRINQPPDQGVKIITHKECNTIGINGMLFNTNKEGTLAFYTPDDITLNNSVALNPIDISIELNKAKSDLEESKEWIRRSNQKLDSIEDKIEEILSKIYHIENEIARIKKLIGEAEPEA

SEQ ID NO: 48 - protein, 516 aa, Artificial Sequence
  PIV200281
MPISILLIITTMIMASHCQIDITKLQHVGVLVNSPKGMKISQNFETRYLILSLIPKIEDSNSCGDQQIKQYKRLLDRLIIPLYDGLRLQKDVIVTNQESNENTDPRTERFFGGVIGTIALGVATSAQITAAVALVEAKQARSDIEKLKEAIRDTNKAVQSVQSSVGPLIVAIKSVQDYVNKEIVPSIARLGCEAAGLQLGIALTQHYSELTNIFGDNIGSLQEKGIKLQGIASLYRTNITEIFTTSTVDKYDIYDLLFTESIKVRVIDVDLNDYSITLQVRLPLLTRLLNTQIYKVDSISYNIQNREWYIPLPSHIMTKGAFLGGADVKECIEAFSSYICPSDPGFVLNHEMESCLSGNISQCPRTTVTSDIVPRYAFVNGGVVANCITTTCTCNGIGNRINQPPDQGVKIITHKECNTIGINGMLFNTNKEGTLPFYTPDDITLNNSVALNPIDISIELNKAKSDLEESKEWIRRSNQKLDSIEDKIEEILSKIYHIENEIARIKKLIGEAEPEA

SEQ ID NO: 49 - protein, 516 aa, Artificial Sequence
  PIV200282
MPISILLIITTMIMASHCQIDITKLQHVGVLVNSPKGMKISQNFETRYLILSLIPKIEDSNSCGDQQIKQYKRLLDRLIIPLYDGLRLQKDVIVTNQESNENTDPRTERFFGGVIGTIALGVATSAQITAAVALVEAKQARSDIEKLKEAIRDTNKAVQSVQSSVGPLIVAIKSVQDYVNKEIVPSIARLGCEAAGLQLGIALTQHYSELTNIFGDNIGSLQEKGIKLQGIASLYRTNITEIFTTSTVDKYDIYDLLFTESIKVRVIDVDLNDYSITLQVRLPLLTRLLNTQIYKVDSISYNIQNREWYIPLPSHIMTKGAFLGGADVKECIEAPSSYICPSDPGFVLNHEMESCLSGNISQCPRTTVTSDIVPRYAFVNGGVVANCITTTCTCNGIGNRINQPPDQGVKIITHKECNTIGINGMLFNTNKEGTLAFYTPDDITLNNSVALNPIDISIELNKAKSDLEESKEWIRRSNQKLDSIEDKIEEILSKIYHIENEIARIKKLIGEAEPEA

SEQ ID NO: 50 - protein, 516 aa, Artificial Sequence
  PIV200283
MPISILLIITTMIMASHCQIDITKLQHVGVLVNSPKGMKISQNFETRYLILSLIPKIEDSNSCGDQQIKQYKRLLDRLIIPLYDGLRLQKDVIVTNQESNENTDPRTERFFGGVIGTIALGVATSAQITAAVALVEAKQARSDIEKLKEAIRDTNKAVQSVQSSVGPLIVAIKSVQDYVNKEIVPSIARLGCEAAGLQLGIALTQHYSELTNIFGDNIGSLQEKGIKLQGIASLYRTNITEIFTTSTVDKYDIYDLLFTESIKVRVIDVDLNDYSITLQVRLPLLTRLLNTQIYKVDSISYNIQNREWYIPLPSHIMTKGAFLGGADVKECIEAFSSYICPSDPGFVLNHEMESCLSGNISQCPRTLVTSDIVPRYAFVNGGVVANCITTTCTCNGIGNRINQPPDQGVKIITHKECNTIGINGMLFNTNKEGTLAFYTPDDITLNNSVALNPIDISIELNKAKSDLEESKEWIRRSNQKLDSIEDKIEEILSKIYHIENEIARIKKLIGEAEPEA

SEQ ID NO: 51 - protein, 516 aa, Artificial Sequence
  PIV200284
MPISILLIITTMIMASHCQIDITKLQHVGVLVNSPKGMKISQNFETRYLILSLIPKIEDSNSCGDQQIKQYKRLLDRLIIPLYDGLRLQKDVIVTNQESNENTDPRTERFFGGVIGTIALGVATSAQITAAVALVEAKQARSDIEKLKEAIRDTNKAVQSVQSSPGPLIVAIKSVQDYVNKEIVPSIARLGCEAAGLQLGIALTQHYSELTNIFGDNIGSLQEKGIKLQGIASLYRTNITEIFTTSTVDKYDIYDLLFTESIKVRVIDVDLNDYSITLQVRLPLLTRLLNTQIYKVDSISYNIQNREWYIPLPSHIMTKGAFLGGADVKECIEAFSSYICPSDPGFVLNHEMESCLSGNISQCPRTTVTSDIVPRYAFVNGGVVANCITTTCTCNGIGNRINQPPDQGVKIITHKECNTIGINGMLFNTNKEGTLAFYTPDDITLNNSVALNPIDISIELNKAKSDLEESKEWIRRSNQKLDSIEDKIEEILSKIYHIENEIARIKKLIGEAEPEA

SEQ ID NO: 52 - protein, 516 aa, Artificial Sequence
  PIV200285
MPISILLIITTMIMASHCQIDITKLQHVGVLVNSPKGMKISQNFETRYLILSLIPKIEDSNSCGDQQIKQYKRLLDRLIIPLYDGLRLQKDVIVTNQESNENTDPRTERFFGGVIGTIALGVATSAQITAAVALVEAKQARSDIEKLKEAIRDTNKAVQSVQSSVGPLIVAIKSVQDYVNKEIVPSIARLGCEAAGLLLGIALTQHYSELTNIFGDNIGSLQEKGIKLQGIASLYRTNITEIFTTSTVDKYDIYDLLFTESIKVRVIDVDLNDYSITLQVRLPLLTRLLNTQIYKVDSISYNIQNREWYIPLPSHIMTKGAFLGGADVKECIEAFSSYICPSDPGFVLNHEMESCLSGNISQCPRTTVTSDIVPRYAFVNGGVVANCITTTCTCNGIGNRINQPPDQGVKIITHKECNTIGINGMLFNTNKEGTLAFYTPDDITLNNSVALNPIDISIELNKAKSDLEESKEWIRRSNQKLDSIEDKIEEILSKIYHIENEIARIKKLIGEAEPEA

SEQ ID NO: 53 - protein, 516 aa, Artificial Sequence
  PIV200286
MPISILLIITTMIMASHCQIDITKLQHVGVLVNSPKGMKISQNFETRYLILSLIPKIEDSNSCGDQQIKQYKRLLDRLIIPLYDGLRLQKDVIVTNQESNENTDPRTERFFGGVIGTIALGVATSAQITAAVALVEAKQARSDIEKLKEAIRDTNKAVQSVQSSVGPLIVAIKSVQDYVNKEIVPSIARLGCEAAGLQLGIALDQHYSELTNIFGDNIGSLQEKGIKLQGIASLYRTNITEIFTTSTVDKYDIYDLLFTESIKVRVIDVDLNDYSITLQVRLPLLTRLLNTQIYKVDSISYNIQNREWYIPLPSHIMTKGAFLGGADVKECIEAFSSYICPSDPGFVLNHEMESCLSGNISQCPRTTVTSDIVPRYAFVNGGVVANCITTTCTCNGIGNRINQPPDQGVKIITHKECNTIGINGMLFNTNKEGTLAFYTPDDITLNNSVALNPIDISIELNKAKSDLEESKEWIRRSNQKLDSIEDKIEEILSKIYHIENEIARIKKLIGEAEPEA

SEQ ID NO: 54 - protein, 516 aa, Artificial Sequence
  PIV200287
MPISILLIITTMIMASHCQIDITKLQHVGVLVNSPKGMKISQNFETRYLILSLIPKIEDSNSCGDQQIKQYKRLLDRLIIPLYDGLRLQKDVIVTNQESNENTDPRTERFFGGVIGTIALGVATSAQITAAVALVEAKQARSDIEKLKEAIRDTNKAVQSVQSSVGNPIVAIKSVQDYVNKEIVPSIARLGCEAAGLQLGIALTQHYSELTNIFGDNIGSLQEKGIKLQGIASLYRTNITEIFTTSTVDKYDIYDLLFTESIKVRVIDVDLNDYSITLQVRLPLLTRLLNTQIYKVDSISYNIQNREWYIPLPSHIMTKGAFLGGADVKECIEAFSSYICPSDPGFVLNHEMESCLSGNISQCPRTTVTSDIVPRYAFVNGGVVANCITTTCTCNGIGNRINQPPDQGVKIITHKECNTIGINGMLFNTNKEGTLPFYTPDDITLNNSVALNPIDISIELNKAKSDLEESKEWIRRSNQKLDSIEDKIEEILSKIYHIENEIARIKKLIGEAEPEA

SEQ ID NO: 55 - protein, 516 aa, Artificial Sequence
  PIV200288
MPISILLIITTMIMASHCQIDITKLQHVGVLVNSPKGMKISQNFETRYLILSLIPKIEDSNSCGDQQIKQYKRLLDRLIIPLYDGLRLQKDVIVTNQESNENTDPRTERFFGGVIGTIALGVATSAQITAAVALVEAKQARSDIEKLKEAIRDTNKAVQSVQSSVGNPIVAIKSVQDYVNKEIVPSIARLGCEAAGLQLGIALTQHYSELTNIFGDNIGSLQEKGIKLQGIASLYRTNITEIFTTSTVDKYDIYDLLFTESIKVRVIDVDLNDYSITLQVRLPLLTRLLNTQIYKVDSISYNIQNREWYIPLPSHIMTKGAFLGGADVKECIEAPSSYICPSDPGFVLNHEMESCLSGNISQCPRTTVTSDIVPRYAFVNGGVVANCITTTCTCNGIGNRINQPPDQGVKIITHKECNTIGINGMLFNTNKEGTLAFYTPDDITLNNSVALNPIDISIELNKAKSDLEESKEWIRRSNQKLDSIEDKIEEILSKIYHIENEIARIKKLIGEAEPEA

SEQ ID NO: 56 - protein, 516 aa, Artificial Sequence
  PIV200289
MPISILLIITTMIMASHCQIDITKLQHVGVLVNSPKGMKISQNFETRYLILSLIPKIEDSNSCGDQQIKQYKRLLDRLIIPLYDGLRLQKDVIVTNQESNENTDPRTERFFGGVIGTIALGVATSAQITAAVALVEAKQARSDIEKLKEAIRDTNKAVQSVQSSVGNPIVAIKSVQDYVNKEIVPSIARLGCEAAGLQLGIALTQHYSELTNIFGDNIGSLQEKGIKLQGIASLYRTNITEIFTTSTVDKYDIYDLLFTESIKVRVIDVDLNDYSITLQVRLPLLTRLLNTQIYKVDSISYNIQNREWYIPLPSHIMTKGAFLGGADVKECIEAFSSYICPSDPGFVLNHEMESCLSGNISQCPRTLVTSDIVPRYAFVNGGVVANCITTTCTCNGIGNRINQPPDQGVKIITHKECNTIGINGMLFNTNKEGTLAFYTPDDITLNNSVALNPIDISIELNKAKSDLEESKEWIRRSNQKLDSIEDKIEEILSKIYHIENEIARIKKLIGEAEPEA

SEQ ID NO: 57 - protein, 516 aa, Artificial Sequence
  PIV200290
MPISILLIITTMIMASHCQIDITKLQHVGVLVNSPKGMKISQNFETRYLILSLIPKIEDSNSCGDQQIKQYKRLLDRLIIPLYDGLRLQKDVIVTNQESNENTDPRTERFFGGVIGTIALGVATSAQITAAVALVEAKQARSDIEKLKEAIRDTNKAVQSVQSSPGNPIVAIKSVQDYVNKEIVPSIARLGCEAAGLQLGIALTQHYSELTNIFGDNIGSLQEKGIKLQGIASLYRTNITEIFTTSTVDKYDIYDLLFTESIKVRVIDVDLNDYSITLQVRLPLLTRLLNTQIYKVDSISYNIQNREWYIPLPSHIMTKGAFLGGADVKECIEAFSSYICPSDPGFVLNHEMESCLSGNISQCPRTTVTSDIVPRYAFVNGGVVANCITTTCTCNGIGNRINQPPDQGVKIITHKECNTIGINGMLFNTNKEGTLAFYTPDDITLNNSVALNPIDISIELNKAKSDLEESKEWIRRSNQKLDSIEDKIEEILSKIYHIENEIARIKKLIGEAEPEA

SEQ ID NO: 58 - protein, 516 aa, Artificial Sequence
  PIV200291
MPISILLIITTMIMASHCQIDITKLQHVGVLVNSPKGMKISQNFETRYLILSLIPKIEDSNSCGDQQIKQYKRLLDRLIIPLYDGLRLQKDVIVTNQESNENTDPRTERFFGGVIGTIALGVATSAQITAAVALVEAKQARSDIEKLKEAIRDTNKAVQSVQSSVGNPIVAIKSVQDYVNKEIVPSIARLGCEAAGLLLGIALTQHYSELTNIFGDNIGSLQEKGIKLQGIASLYRTNITEIFTTSTVDKYDIYDLLFTESIKVRVIDVDLNDYSITLQVRLPLLTRLLNTQIYKVDSISYNIQNREWYIPLPSHIMTKGAFLGGADVKECIEAFSSYICPSDPGFVLNHEMESCLSGNISQCPRTTVTSDIVPRYAFVNGGVVANCITTTCTCNGIGNRINQPPDQGVKIITHKECNTIGINGMLFNTNKEGTLAFYTPDDITLNNSVALNPIDISIELNKAKSDLEESKEWIRRSNQKLDSIEDKIEEILSKIYHIENEIARIKKLIGEAEPEA

SEQ ID NO: 59 - protein, 516 aa, Artificial Sequence
  PIV200292
MPISILLIITTMIMASHCQIDITKLQHVGVLVNSPKGMKISQNFETRYLILSLIPKIEDSNSCGDQQIKQYKRLLDRLIIPLYDGLRLQKDVIVTNQESNENTDPRTERFFGGVIGTIALGVATSAQITAAVALVEAKQARSDIEKLKEAIRDTNKAVQSVQSSVGNPIVAIKSVQDYVNKEIVPSIARLGCEAAGLQLGIALDQHYSELTNIFGDNIGSLQEKGIKLQGIASLYRTNITEIFTTSTVDKYDIYDLLFTESIKVRVIDVDLNDYSITLQVRLPLLTRLLNTQIYKVDSISYNIQNREWYIPLPSHIMTKGAFLGGADVKECIEAFSSYICPSDPGFVLNHEMESCLSGNISQCPRTTVTSDIVPRYAFVNGGVVANCITTTCTCNGIGNRINQPPDQGVKIITHKECNTIGINGMLFNTNKEGTLAFYTPDDITLNNSVALNPIDISIELNKAKSDLEESKEWIRRSNQKLDSIEDKIEEILSKIYHIENEIARIKKLIGEAEPEA

SEQ ID NO: 60 - protein, 516 aa, Artificial Sequence
  PIV200293
MPISILLIITTMIMASHCQIDITKLQHVGVLVNSPKGMKISQNFETRYLILSLIPKIEDSNSCGDQQIKQYKRLLDRLIIPLYDGLRLQKDVIVTNQESNENTDPRTERFFGGVIGTIALGVATSAQITAAVALVEAKQARSDIEKLKEAIRDTNKAVQSVQSSVGNLIVAIKSVQDYVNKEIVPSIARLGCEAAGLQLGIALTQHYSELTNIFGDNIGSLQEKGIKLQGIASLYRTNITEIFTTSTVDKYDIYDLLFTESIKVRVIDVDLNDYSITLQVRLPLLTRLLNTQIYKVDSISYNIQNREWYIPLPSHIMTKGAFLGGADVKECIEAPSSYICPSDPGFVLNHEMESCLSGNISQCPRTTVTSDIVPRYAFVNGGVVANCITTTCTCNGIGNRINQPPDQGVKIITHKECNTIGINGMLFNTNKEGTLPFYTPDDITLNNSVALNPIDISIELNKAKSDLEESKEWIRRSNQKLDSIEDKIEEILSKIYHIENEIARIKKLIGEAEPEA

SEQ ID NO: 61 - protein, 516 aa, Artificial Sequence
  PIV200294
MPISILLIITTMIMASHCQIDITKLQHVGVLVNSPKGMKISQNFETRYLILSLIPKIEDSNSCGDQQIKQYKRLLDRLIIPLYDGLRLQKDVIVTNQESNENTDPRTERFFGGVIGTIALGVATSAQITAAVALVEAKQARSDIEKLKEAIRDTNKAVQSVQSSVGNLIVAIKSVQDYVNKEIVPSIARLGCEAAGLQLGIALTQHYSELTNIFGDNIGSLQEKGIKLQGIASLYRTNITEIFTTSTVDKYDIYDLLFTESIKVRVIDVDLNDYSITLQVRLPLLTRLLNTQIYKVDSISYNIQNREWYIPLPSHIMTKGAFLGGADVKECIEAFSSYICPSDPGFVLNHEMESCLSGNISQCPRTLVTSDIVPRYAFVNGGVVANCITTTCTCNGIGNRINQPPDQGVKIITHKECNTIGINGMLFNTNKEGTLPFYTPDDITLNNSVALNPIDISIELNKAKSDLEESKEWIRRSNQKLDSIEDKIEEILSKIYHIENEIARIKKLIGEAEPEA

SEQ ID NO: 62 - protein, 516 aa, Artificial Sequence
  PIV200295
MPISILLIITTMIMASHCQIDITKLQHVGVLVNSPKGMKISQNFETRYLILSLIPKIEDSNSCGDQQIKQYKRLLDRLIIPLYDGLRLQKDVIVTNQESNENTDPRTERFFGGVIGTIALGVATSAQITAAVALVEAKQARSDIEKLKEAIRDTNKAVQSVQSSPGNLIVAIKSVQDYVNKEIVPSIARLGCEAAGLQLGIALTQHYSELTNIFGDNIGSLQEKGIKLQGIASLYRTNITEIFTTSTVDKYDIYDLLFTESIKVRVIDVDLNDYSITLQVRLPLLTRLLNTQIYKVDSISYNIQNREWYIPLPSHIMTKGAFLGGADVKECIEAFSSYICPSDPGFVLNHEMESCLSGNISQCPRTTVTSDIVPRYAFVNGGVVANCITTTCTCNGIGNRINQPPDQGVKIITHKECNTIGINGMLFNTNKEGTLPFYTPDDITLNNSVALNPIDISIELNKAKSDLEESKEWIRRSNQKLDSIEDKIEEILSKIYHIENEIARIKKLIGEAEPEA

SEQ ID NO: 63 - protein, 516 aa, Artificial Sequence
  PIV200296
MPISILLIITTMIMASHCQIDITKLQHVGVLVNSPKGMKISQNFETRYLILSLIPKIEDSNSCGDQQIKQYKRLLDRLIIPLYDGLRLQKDVIVTNQESNENTDPRTERFFGGVIGTIALGVATSAQITAAVALVEAKQARSDIEKLKEAIRDTNKAVQSVQSSVGNLIVAIKSVQDYVNKEIVPSIARLGCEAAGLLLGIALTQHYSELTNIFGDNIGSLQEKGIKLQGIASLYRTNITEIFTTSTVDKYDIYDLLFTESIKVRVIDVDLNDYSITLQVRLPLLTRLLNTQIYKVDSISYNIQNREWYIPLPSHIMTKGAFLGGADVKECIEAFSSYICPSDPGFVLNHEMESCLSGNISQCPRTTVTSDIVPRYAFVNGGVVANCITTTCTCNGIGNRINQPPDQGVKIITHKECNTIGINGMLFNTNKEGTLPFYTPDDITLNNSVALNPIDISIELNKAKSDLEESKEWIRRSNQKLDSIEDKIEEILSKIYHIENEIARIKKLIGEAEPEA

SEQ ID NO: 64 - protein, 516 aa, Artificial Sequence
  PIV200297
MPISILLIITTMIMASHCQIDITKLQHVGVLVNSPKGMKISQNFETRYLILSLIPKIEDSNSCGDQQIKQYKRLLDRLIIPLYDGLRLQKDVIVTNQESNENTDPRTERFFGGVIGTIALGVATSAQITAAVALVEAKQARSDIEKLKEAIRDTNKAVQSVQSSVGNLIVAIKSVQDYVNKEIVPSIARLGCEAAGLQLGIALDQHYSELTNIFGDNIGSLQEKGIKLQGIASLYRTNITEIFTTSTVDKYDIYDLLFTESIKVRVIDVDLNDYSITLQVRLPLLTRLLNTQIYKVDSISYNIQNREWYIPLPSHIMTKGAFLGGADVKECIEAFSSYICPSDPGFVLNHEMESCLSGNISQCPRTTVTSDIVPRYAFVNGGVVANCITTTCTCNGIGNRINQPPDQGVKIITHKECNTIGINGMLFNTNKEGTLPFYTPDDITLNNSVALNPIDISIELNKAKSDLEESKEWIRRSNQKLDSIEDKIEEILSKIYHIENEIARIKKLIGEAEPEA

SEQ ID NO: 65 - protein, 516 aa, Artificial Sequence
  PIV200298
MPISILLIITTMIMASHCQIDITKLQHVGVLVNSPKGMKISQNFETRYLILSLIPKIEDSNSCGDQQIKQYKRLLDRLIIPLYDGLRLQKDVIVTNQESNENTDPRTERFFGGVIGTIALGVATSAQITAAVALVEAKQARSDIEKLKEAIRDTNKAVQSVQSSVGNLIVAIKSVQDYVNKEIVPSIARLGCEAAGLQLGIALTQHYSELTNIFGDNIGSLQEKGIKLQGIASLYRTNITEIFTTSTVDKYDIYDLLFTESIKVRVIDVDLNDYSITLQVRLPLLTRLLNTQIYKVDSISYNIQNREWYIPLPSHIMTKGAFLGGADVKECIEAPSSYICPSDPGFVLNHEMESCLSGNISQCPRTLVTSDIVPRYAFVNGGVVANCITTTCTCNGIGNRINQPPDQGVKIITHKECNTIGINGMLFNTNKEGTLAFYTPDDITLNNSVALNPIDISIELNKAKSDLEESKEWIRRSNQKLDSIEDKIEEILSKIYHIENEIARIKKLIGEAEPEA

SEQ ID NO: 66 - protein, 516 aa, Artificial Sequence
  PIV200299
MPISILLIITTMIMASHCQIDITKLQHVGVLVNSPKGMKISQNFETRYLILSLIPKIEDSNSCGDQQIKQYKRLLDRLIIPLYDGLRLQKDVIVTNQESNENTDPRTERFFGGVIGTIALGVATSAQITAAVALVEAKQARSDIEKLKEAIRDTNKAVQSVQSSPGNLIVAIKSVQDYVNKEIVPSIARLGCEAAGLQLGIALTQHYSELTNIFGDNIGSLQEKGIKLQGIASLYRTNITEIFTTSTVDKYDIYDLLFTESIKVRVIDVDLNDYSITLQVRLPLLTRLLNTQIYKVDSISYNIQNREWYIPLPSHIMTKGAFLGGADVKECIEAPSSYICPSDPGFVLNHEMESCLSGNISQCPRTTVTSDIVPRYAFVNGGVVANCITTTCTCNGIGNRINQPPDQGVKIITHKECNTIGINGMLFNTNKEGTLAFYTPDDITLNNSVALNPIDISIELNKAKSDLEESKEWIRRSNQKLDSIEDKIEEILSKIYHIENEIARIKKLIGEAEPEA

SEQ ID NO: 67 - protein, 516 aa, Artificial Sequence
  PIV200300
MPISILLIITTMIMASHCQIDITKLQHVGVLVNSPKGMKISQNFETRYLILSLIPKIEDSNSCGDQQIKQYKRLLDRLIIPLYDGLRLQKDVIVTNQESNENTDPRTERFFGGVIGTIALGVATSAQITAAVALVEAKQARSDIEKLKEAIRDTNKAVQSVQSSVGNLIVAIKSVQDYVNKEIVPSIARLGCEAAGLLLGIALTQHYSELTNIFGDNIGSLQEKGIKLQGIASLYRTNITEIFTTSTVDKYDIYDLLFTESIKVRVIDVDLNDYSITLQVRLPLLTRLLNTQIYKVDSISYNIQNREWYIPLPSHIMTKGAFLGGADVKECIEAPSSYICPSDPGFVLNHEMESCLSGNISQCPRTTVTSDIVPRYAFVNGGVVANCITTTCTCNGIGNRINQPPDQGVKIITHKECNTIGINGMLFNTNKEGTLAFYTPDDITLNNSVALNPIDISIELNKAKSDLEESKEWIRRSNQKLDSIEDKIEEILSKIYHIENEIARIKKLIGEAEPEA

SEQ ID NO: 68 - protein, 516 aa, Artificial Sequence
  PIV200301
MPISILLIITTMIMASHCQIDITKLQHVGVLVNSPKGMKISQNFETRYLILSLIPKIEDSNSCGDQQIKQYKRLLDRLIIPLYDGLRLQKDVIVTNQESNENTDPRTERFFGGVIGTIALGVATSAQITAAVALVEAKQARSDIEKLKEAIRDTNKAVQSVQSSVGNLIVAIKSVQDYVNKEIVPSIARLGCEAAGLQLGIALDQHYSELTNIFGDNIGSLQEKGIKLQGIASLYRTNITEIFTTSTVDKYDIYDLLFTESIKVRVIDVDLNDYSITLQVRLPLLTRLLNTQIYKVDSISYNIQNREWYIPLPSHIMTKGAFLGGADVKECIEAPSSYICPSDPGFVLNHEMESCLSGNISQCPRTTVTSDIVPRYAFVNGGVVANCITTTCTCNGIGNRINQPPDQGVKIITHKECNTIGINGMLFNTNKEGTLAFYTPDDITLNNSVALNPIDISIELNKAKSDLEESKEWIRRSNQKLDSIEDKIEEILSKIYHIENEIARIKKLIGEAEPEA

SEQ ID NO: 69 - protein, 516 aa, Artificial Sequence
  PIV200302
MPISILLIITTMIMASHCQIDITKLQHVGVLVNSPKGMKISQNFETRYLILSLIPKIEDSNSCGDQQIKQYKRLLDRLIIPLYDGLRLQKDVIVTNQESNENTDPRTERFFGGVIGTIALGVATSAQITAAVALVEAKQARSDIEKLKEAIRDTNKAVQSVQSSPGNLIVAIKSVQDYVNKEIVPSIARLGCEAAGLQLGIALTQHYSELTNIFGDNIGSLQEKGIKLQGIASLYRTNITEIFTTSTVDKYDIYDLLFTESIKVRVIDVDLNDYSITLQVRLPLLTRLLNTQIYKVDSISYNIQNREWYIPLPSHIMTKGAFLGGADVKECIEAFSSYICPSDPGFVLNHEMESCLSGNISQCPRTLVTSDIVPRYAFVNGGVVANCITTTCTCNGIGNRINQPPDQGVKIITHKECNTIGINGMLFNTNKEGTLAFYTPDDITLNNSVALNPIDISIELNKAKSDLEESKEWIRRSNQKLDSIEDKIEEILSKIYHIENEIARIKKLIGEAEPEA

SEQ ID NO: 70 - protein, 516 aa, Artificial Sequence
  PIV200303
MPISILLIITTMIMASHCQIDITKLQHVGVLVNSPKGMKISQNFETRYLILSLIPKIEDSNSCGDQQIKQYKRLLDRLIIPLYDGLRLQKDVIVTNQESNENTDPRTERFFGGVIGTIALGVATSAQITAAVALVEAKQARSDIEKLKEAIRDTNKAVQSVQSSVGNLIVAIKSVQDYVNKEIVPSIARLGCEAAGLLLGIALTQHYSELTNIFGDNIGSLQEKGIKLQGIASLYRTNITEIFTTSTVDKYDIYDLLFTESIKVRVIDVDLNDYSITLQVRLPLLTRLLNTQIYKVDSISYNIQNREWYIPLPSHIMTKGAFLGGADVKECIEAFSSYICPSDPGFVLNHEMESCLSGNISQCPRTLVTSDIVPRYAFVNGGVVANCITTTCTCNGIGNRINQPPDQGVKIITHKECNTIGINGMLFNTNKEGTLAFYTPDDITLNNSVALNPIDISIELNKAKSDLEESKEWIRRSNQKLDSIEDKIEEILSKIYHIENEIARIKKLIGEAEPEA

SEQ ID NO: 71 - protein, 516 aa, Artificial Sequence
  PIV200304
MPISILLIITTMIMASHCQIDITKLQHVGVLVNSPKGMKISQNFETRYLILSLIPKIEDSNSCGDQQIKQYKRLLDRLIIPLYDGLRLQKDVIVTNQESNENTDPRTERFFGGVIGTIALGVATSAQITAAVALVEAKQARSDIEKLKEAIRDTNKAVQSVQSSVGNLIVAIKSVQDYVNKEIVPSIARLGCEAAGLQLGIALDQHYSELTNIFGDNIGSLQEKGIKLQGIASLYRTNITEIFTTSTVDKYDIYDLLFTESIKVRVIDVDLNDYSITLQVRLPLLTRLLNTQIYKVDSISYNIQNREWYIPLPSHIMTKGAFLGGADVKECIEAFSSYICPSDPGFVLNHEMESCLSGNISQCPRTLVTSDIVPRYAFVNGGVVANCITTTCTCNGIGNRINQPPDQGVKIITHKECNTIGINGMLFNTNKEGTLAFYTPDDITLNNSVALNPIDISIELNKAKSDLEESKEWIRRSNQKLDSIEDKIEEILSKIYHIENEIARIKKLIGEAEPEA

SEQ ID NO: 72 - protein, 516 aa, Artificial Sequence
  PIV200305
MPISILLIITTMIMASHCQIDITKLQHVGVLVNSPKGMKIPQNFETRYLILSLIPKIEDSNSCGDQQIKQYKRLLDRLIIPLYDGLRLMKDVIVTNQESNENTDPRTERFFGGVIGTIALGVATSAQITAAVALVEAKQARSDIEKLKEAIRDTNKAVQSVQSSVGNLIVAIKSVQDYVNKEIVPSIARLGCEAAGLQLGIALTQHYSELTNIFGDNIGSLIEKGIKLQGIASLYRTNITEIFTTSTVDKYDIYDLLFTESIKVRVIDVDLNDYSITLQVRLPLLTRLLNTQIYKVDSISYNIQNREWYIPLPSHIMTKGAFLGGADVKECIEAFSSYICPSDPGFVLNHEMESCLSGNISQCPRTTVTSDIVPRYAFVNGGVVANCITTTCTCNGIGNRINQPPDQGVKIITHKECNTIGINGMLFNTNKEGTLAFYTPDDITLNNSVALNPIDISIELNKAKSDLEESKEWIRRSNQKLDSIEDKIEEILSKIYHIENEIARIKKLIGEAEPEA

SEQ ID NO: 73 - protein, 516 aa, Artificial Sequence
  PIV200306
MPISILLIITTMIMASHCQIDITKLQHVGVLVNSPKGCKISQNFETRYLILSLIPKIEDSNSCGDQQIKQYKRLLDRLIIPLYDGLRLMKDVIVTNQESNENTDPRTERFFGGVIGTIALGVATSAQITAAVALVEAKQARSDIEKLKEAIRDTNKAVQSVQSSVGNLIVAIKSVQDYVNKEIVPSIARLGCEAAGLQLGIALTQHYSELTNIFGDNIGSLIEKGIKLQGIASLYRTNITEIFTTSTVDKYDIYDLLFTESIKVRVIDVDLNDYSITLQVRLPLLTRLLNCQIYKVDSISYNIQNREWYIPLPSHIMTKGAFLGGADVKECIEAFSSYICPSDPGFVLNHEMESCLSGNISQCPRTTVTSDIVPRYAFVNGGVVANCITTTCTCNGIGNRINQPPDQGVKIITHKECNTIGINGMLFNTNKEGTLAFYTPDDITLNNSVALNPIDISIELNKAKSDLEESKEWIRRSNQKLDSIEDKIEEILSKIYHIENEIARIKKLIGEAEPEA

SEQ ID NO: 74 - protein, 516 aa, Artificial Sequence
  PIV200307
MPISILLIITTMIMASHCQIDITKLQHVGVLVNSPKGMKISQNFETRYLILSLIPKIEDSNSCGDQQIKQYKRLLDRLIIPLYDCLRLMKDVIVTNQESNENTDPRTERFFGGVIGTIALGVATSAQITAAVALVEAKQARSDIEKLKEAIRDTNKAVQSVQSSVGNLIVAIKSVQDYVNKEIVPSIARLGCEAAGLQLGIALTQHYSELTNIFGDNIGSCIEKGIKLQGIASLYRTNITEIFTTSTVDKYDIYDLLFTESIKVRVIDVDLNDYSITLQVRLPLLTRLLNTQIYKVDSISYNIQNREWYIPLPSHIMTKGAFLGGADVKECIEAFSSYICPSDPGFVLNHEMESCLSGNISQCPRTTVTSDIVPRYAFVNGGVVANCITTTCTCNGIGNRINQPPDQGVKIITHKECNTIGINGMLFNTNKEGTLAFYTPDDITLNNSVALNPIDISIELNKAKSDLEESKEWIRRSNQKLDSIEDKIEEILSKIYHIENEIARIKKLIGEAEPEA

SEQ ID NO: 75 - protein, 516 aa, Artificial Sequence
  PIV200308
MPISILLIITTMIMASHCQIDITKLQHVGVLVNSPKGMKISQNFETRYLILSLIPKIEDSNSCGDQQIKQYKRLLDRLIIPLYDGLRLMKDVIVTNQESNENTDPRTERFFGGVIGTIALGVATSAQITAAVALVEAKQARSDIEKLKEAIRDTNKAVQSVQSSVGPLIVAIKSVQDYVNKEIVPSIARLGCEAAGLQLGIALTQHYSELTNIFGDNIGSLIEKGIKLQGIASLYRTNITEIFTTSTVDKYDIYDLLFTESIKVRVIDVDLNDYSITLQVRLPLLTRLLNTQIYKVDSISYNIQNREWYIPLPSHIMTKGAFLGGADVKECIEAFSSYICPSDPGFVLNHEMESCLSGNISQCPRTTVTSDIVPRYAFVNGGVVANCITTTCTCNGIGNRINQPPDQGVKIITHKECNTIGINGMLFNTNKEGTLAFYTPDDITLNNSVALNPIDISIELNKAKSDLEESKEWIRRSNQKLDSIEDKIEEILSKIYHIENEIARIKKLIGEAEPEA

SEQ ID NO: 76 - protein, 516 aa, Artificial Sequence
  PIV200309
MPISILLIITTMIMASHCQIDITKLQHVGVLVNSPKGMKISQNFETRYLILSLIPKIEDSNSCGDQQIKQYKRLLDRLIIPLYDGLRLMKDVIVTNQESNENTDPRTERFFGGVIGTIALGVATSAQITAAVALVEAKQARSDIEKLKEAIRDTNKAVQSVQSSVGNPIVAIKSVQDYVNKEIVPSIARLGCEAAGLQLGIALTQHYSELTNIFGDNIGSLIEKGIKLQGIASLYRTNITEIFTTSTVDKYDIYDLLFTESIKVRVIDVDLNDYSITLQVRLPLLTRLLNTQIYKVDSISYNIQNREWYIPLPSHIMTKGAFLGGADVKECIEAFSSYICPSDPGFVLNHEMESCLSGNISQCPRTTVTSDIVPRYAFVNGGVVANCITTTCTCNGIGNRINQPPDQGVKIITHKECNTIGINGMLFNTNKEGTLAFYTPDDITLNNSVALNPIDISIELNKAKSDLEESKEWIRRSNQKLDSIEDKIEEILSKIYHIENEIARIKKLIGEAEPEA

SEQ ID NO: 77 - protein, 516 aa, Artificial Sequence
  PIV200310
MPISILLIITTMIMASHCQIDITKLQHVGVLVNSPKGMKISQNFETRYLILSLIPKIEDSNSCGDQQIKQYKRLLDRLIIPLYDGLRLMKDVIVTNQESNENTDPRTERFFGGVIGTIALGVATSAQITAAVALVEAKQARSDIEKLKEAIRDTNKAVQSVQSSVGNLIVAIKSVQDYVNKEIVPSIARLGCEAAGLQLGIALTQHYSELTNIFGDNIGSLIEKGIKLQGIASLYRTNITEIFTTSTVDKYDIYDLLFTESIKVRVIDVDLNDYSITLQVRLPLLTRLLNTQIYKVDSISYNIQNREWYIPLPSHIMTKGAFLGGADVKECIEAFSSYICPSDPGFVLNHEMESCLSGNISQCPRTTVTSDIVPRYAFVNGGVVANCITTTCTCNGIGNRINQPPDQGVKIITHKECNTIGINGMLFNTNKEGTLPFYTPDDITLNNSVALNPIDISIELNKAKSDLEESKEWIRRSNQKLDSIEDKIEEILSKIYHIENEIARIKKLIGEAEPEA

SEQ ID NO: 78 - protein, 516 aa, Artificial Sequence
  PIV200311
MPISILLIITTMIMASHCQIDITKLQHVGVLVNSPKGMKISQNFETRYLILSLIPKIEDSNSCGDQQIKQYKRLLDRLIIPLYDGLRLMKDVIVTNQESNENTDPRTERFFGGVIGTIALGVATSAQITAAVALVEAKQARSDIEKLKEAIRDTNKAVQSVQSSVGNLIVAIKSVQDYVNKEIVPSIARLGCEAAGLQLGIALTQHYSELTNIFGDNIGSLIEKGIKLQGIASLYRTNITEIFTTSTVDKYDIYDLLFTESIKVRVIDVDLNDYSITLQVRLPLLTRLLNTQIYKVDSISYNIQNREWYIPLPSHIMTKGAFLGGADVKECIEAPSSYICPSDPGFVLNHEMESCLSGNISQCPRTTVTSDIVPRYAFVNGGVVANCITTTCTCNGIGNRINQPPDQGVKIITHKECNTIGINGMLFNTNKEGTLAFYTPDDITLNNSVALNPIDISIELNKAKSDLEESKEWIRRSNQKLDSIEDKIEEILSKIYHIENEIARIKKLIGEAEPEA

SEQ ID NO: 79 - protein, 516 aa, Artificial Sequence
  PIV200312
MPISILLIITTMIMASHCQIDITKLQHVGVLVNSPKGMKISQNFETRYLILSLIPKIEDSNSCGDQQIKQYKRLLDRLIIPLYDGLRLMKDVIVTNQESNENTDPRTERFFGGVIGTIALGVATSAQITAAVALVEAKQARSDIEKLKEAIRDTNKAVQSVQSSVGNLIVAIKSVQDYVNKEIVPSIARLGCEAAGLQLGIALTQHYSELTNIFGDNIGSLIEKGIKLQGIASLYRTNITEIFTTSTVDKYDIYDLLFTESIKVRVIDVDLNDYSITLQVRLPLLTRLLNTQIYKVDSISYNIQNREWYIPLPSHIMTKGAFLGGADVKECIEAFSSYICPSDPGFVLNHEMESCLSGNISQCPRTLVTSDIVPRYAFVNGGVVANCITTTCTCNGIGNRINQPPDQGVKIITHKECNTIGINGMLFNTNKEGTLAFYTPDDITLNNSVALNPIDISIELNKAKSDLEESKEWIRRSNQKLDSIEDKIEEILSKIYHIENEIARIKKLIGEAEPEA

SEQ ID NO: 80 - protein, 516 aa, Artificial Sequence
  PIV200313
MPISILLIITTMIMASHCQIDITKLQHVGVLVNSPKGMKISQNFETRYLILSLIPKIEDSNSCGDQQIKQYKRLLDRLIIPLYDGLRLMKDVIVTNQESNENTDPRTERFFGGVIGTIALGVATSAQITAAVALVEAKQARSDIEKLKEAIRDTNKAVQSVQSSPGNLIVAIKSVQDYVNKEIVPSIARLGCEAAGLQLGIALTQHYSELTNIFGDNIGSLIEKGIKLQGIASLYRTNITEIFTTSTVDKYDIYDLLFTESIKVRVIDVDLNDYSITLQVRLPLLTRLLNTQIYKVDSISYNIQNREWYIPLPSHIMTKGAFLGGADVKECIEAFSSYICPSDPGFVLNHEMESCLSGNISQCPRTTVTSDIVPRYAFVNGGVVANCITTTCTCNGIGNRINQPPDQGVKIITHKECNTIGINGMLFNTNKEGTLAFYTPDDITLNNSVALNPIDISIELNKAKSDLEESKEWIRRSNQKLDSIEDKIEEILSKIYHIENEIARIKKLIGEAEPEA

SEQ ID NO: 81 - protein, 516 aa, Artificial Sequence
  PIV200314
MPISILLIITTMIMASHCQIDITKLQHVGVLVNSPKGMKISQNFETRYLILSLIPKIEDSNSCGDQQIKQYKRLLDRLIIPLYDGLRLMKDVIVTNQESNENTDPRTERFFGGVIGTIALGVATSAQITAAVALVEAKQARSDIEKLKEAIRDTNKAVQSVQSSVGNLIVAIKSVQDYVNKEIVPSIARLGCEAAGLLLGIALTQHYSELTNIFGDNIGSLIEKGIKLQGIASLYRTNITEIFTTSTVDKYDIYDLLFTESIKVRVIDVDLNDYSITLQVRLPLLTRLLNTQIYKVDSISYNIQNREWYIPLPSHIMTKGAFLGGADVKECIEAFSSYICPSDPGFVLNHEMESCLSGNISQCPRTTVTSDIVPRYAFVNGGVVANCITTTCTCNGIGNRINQPPDQGVKIITHKECNTIGINGMLFNTNKEGTLAFYTPDDITLNNSVALNPIDISIELNKAKSDLEESKEWIRRSNQKLDSIEDKIEEILSKIYHIENEIARIKKLIGEAEPEA

SEQ ID NO: 82 - protein, 516 aa, Artificial Sequence
  PIV200315
MPISILLIITTMIMASHCQIDITKLQHVGVLVNSPKGMKISQNFETRYLILSLIPKIEDSNSCGDQQIKQYKRLLDRLIIPLYDGLRLMKDVIVTNQESNENTDPRTERFFGGVIGTIALGVATSAQITAAVALVEAKQARSDIEKLKEAIRDTNKAVQSVQSSVGNLIVAIKSVQDYVNKEIVPSIARLGCEAAGLQLGIALDQHYSELTNIFGDNIGSLIEKGIKLQGIASLYRTNITEIFTTSTVDKYDIYDLLFTESIKVRVIDVDLNDYSITLQVRLPLLTRLLNTQIYKVDSISYNIQNREWYIPLPSHIMTKGAFLGGADVKECIEAFSSYICPSDPGFVLNHEMESCLSGNISQCPRTTVTSDIVPRYAFVNGGVVANCITTTCTCNGIGNRINQPPDQGVKIITHKECNTIGINGMLFNTNKEGTLAFYTPDDITLNNSVALNPIDISIELNKAKSDLEESKEWIRRSNQKLDSIEDKIEEILSKIYHIENEIARIKKLIGEAEPEA

SEQ ID NO: 83 - protein, 516 aa, Artificial Sequence
  PIV200316
MPISILLIITTMIMASHCQIDITKLQHVGVLVNSPKGMKIPQNFETRYLILSLIPKIEDSNSCGDQQIKQYKRLLDRLIIPLYDGLRLQKDVIVTNQESNENTDPRTERFFGGVIGTIALGVATSAQITAAVALVEAKQARSDIEKLKEAIRDTNKAVQSVQSSVGNLIVAIKSVQDYVNKEIVPCIARLGCEACGLQLGIALTQHYSELTNIFGDNIGSLQEKGIKLQGIASLYRTNITEIFTTSTVDKYDIYDLLFTESIKVRVIDVDLNDYSITLQVRLPLLTRLLNTQIYKVDSISYNIQNREWYIPLPSHIMTKGAFLGGADVKECIEAFSSYICPSDPGFVLNHEMESCLSGNISQCPRTTVTSDIVPRYAFVNGGVVANCITTTCTCNGIGNRINQPPDQGVKIITHKECNTIGINGMLFNTNKEGTLAFYTPDDITLNNSVALNPIDISIELNKAKSDLEESKEWIRRSNQKLDSIEDKIEEILSKIYHIENEIARIKKLIGEAEPEA

SEQ ID NO: 84 - protein, 516 aa, Artificial Sequence
  PIV200317
MPISILLIITTMIMASHCQIDITKLQHVGVLVNSPKGCKISQNFETRYLILSLIPKIEDSNSCGDQQIKQYKRLLDRLIIPLYDGLRLQKDVIVTNQESNENTDPRTERFFGGVIGTIALGVATSAQITAAVALVEAKQARSDIEKLKEAIRDTNKAVQSVQSSVGNLIVAIKSVQDYVNKEIVPCIARLGCEACGLQLGIALTQHYSELTNIFGDNIGSLQEKGIKLQGIASLYRTNITEIFTTSTVDKYDIYDLLFTESIKVRVIDVDLNDYSITLQVRLPLLTRLLNCQIYKVDSISYNIQNREWYIPLPSHIMTKGAFLGGADVKECIEAFSSYICPSDPGFVLNHEMESCLSGNISQCPRTTVTSDIVPRYAFVNGGVVANCITTTCTCNGIGNRINQPPDQGVKIITHKECNTIGINGMLFNTNKEGTLAFYTPDDITLNNSVALNPIDISIELNKAKSDLEESKEWIRRSNQKLDSIEDKIEEILSKIYHIENEIARIKKLIGEAEPEA

SEQ ID NO: 85 - protein, 516 aa, Artificial Sequence
  PIV200318
MPISILLIITTMIMASHCQIDITKLQHVGVLVNSPKGMKISQNFETRYLILSLIPKIEDSNSCGDQQIKQYKRLLDRLIIPLYDCLRLQKDVIVTNQESNENTDPRTERFFGGVIGTIALGVATSAQITAAVALVEAKQARSDIEKLKEAIRDTNKAVQSVQSSVGNLIVAIKSVQDYVNKEIVPCIARLGCEACGLQLGIALTQHYSELTNIFGDNIGSCQEKGIKLQGIASLYRTNITEIFTTSTVDKYDIYDLLFTESIKVRVIDVDLNDYSITLQVRLPLLTRLLNTQIYKVDSISYNIQNREWYIPLPSHIMTKGAFLGGADVKECIEAFSSYICPSDPGFVLNHEMESCLSGNISQCPRTTVTSDIVPRYAFVNGGVVANCITTTCTCNGIGNRINQPPDQGVKIITHKECNTIGINGMLFNTNKEGTLAFYTPDDITLNNSVALNPIDISIELNKAKSDLEESKEWIRRSNQKLDSIEDKIEEILSKIYHIENEIARIKKLIGEAEPEA

SEQ ID NO: 86 - protein, 516 aa, Artificial Sequence
  PIV200319
MPISILLIITTMIMASHCQIDITKLQHVGVLVNSPKGMKISQNFETRYLILSLIPKIEDSNSCGDQQIKQYKRLLDRLIIPLYDGLRLQKDVIVTNQESNENTDPRTERFFGGVIGTIALGVATSAQITAAVALVEAKQARSDIEKLKEAIRDTNKAVQSVQSSVGPLIVAIKSVQDYVNKEIVPCIARLGCEACGLQLGIALTQHYSELTNIFGDNIGSLQEKGIKLQGIASLYRTNITEIFTTSTVDKYDIYDLLFTESIKVRVIDVDLNDYSITLQVRLPLLTRLLNTQIYKVDSISYNIQNREWYIPLPSHIMTKGAFLGGADVKECIEAFSSYICPSDPGFVLNHEMESCLSGNISQCPRTTVTSDIVPRYAFVNGGVVANCITTTCTCNGIGNRINQPPDQGVKIITHKECNTIGINGMLFNTNKEGTLAFYTPDDITLNNSVALNPIDISIELNKAKSDLEESKEWIRRSNQKLDSIEDKIEEILSKIYHIENEIARIKKLIGEAEPEA

SEQ ID NO: 87 - protein, 516 aa, Artificial Sequence
  PIV200320
MPISILLIITTMIMASHCQIDITKLQHVGVLVNSPKGMKISQNFETRYLILSLIPKIEDSNSCGDQQIKQYKRLLDRLIIPLYDGLRLQKDVIVTNQESNENTDPRTERFFGGVIGTIALGVATSAQITAAVALVEAKQARSDIEKLKEAIRDTNKAVQSVQSSVGNPIVAIKSVQDYVNKEIVPCIARLGCEACGLQLGIALTQHYSELTNIFGDNIGSLQEKGIKLQGIASLYRTNITEIFTTSTVDKYDIYDLLFTESIKVRVIDVDLNDYSITLQVRLPLLTRLLNTQIYKVDSISYNIQNREWYIPLPSHIMTKGAFLGGADVKECIEAFSSYICPSDPGFVLNHEMESCLSGNISQCPRTTVTSDIVPRYAFVNGGVVANCITTTCTCNGIGNRINQPPDQGVKIITHKECNTIGINGMLFNTNKEGTLAFYTPDDITLNNSVALNPIDISIELNKAKSDLEESKEWIRRSNQKLDSIEDKIEEILSKIYHIENEIARIKKLIGEAEPEA

SEQ ID NO: 88 - protein, 516 aa, Artificial Sequence
  PIV200321
MPISILLIITTMIMASHCQIDITKLQHVGVLVNSPKGMKISQNFETRYLILSLIPKIEDSNSCGDQQIKQYKRLLDRLIIPLYDGLRLQKDVIVTNQESNENTDPRTERFFGGVIGTIALGVATSAQITAAVALVEAKQARSDIEKLKEAIRDTNKAVQSVQSSVGNLIVAIKSVQDYVNKEIVPCIARLGCEACGLQLGIALTQHYSELTNIFGDNIGSLQEKGIKLQGIASLYRTNITEIFTTSTVDKYDIYDLLFTESIKVRVIDVDLNDYSITLQVRLPLLTRLLNTQIYKVDSISYNIQNREWYIPLPSHIMTKGAFLGGADVKECIEAFSSYICPSDPGFVLNHEMESCLSGNISQCPRTTVTSDIVPRYAFVNGGVVANCITTTCTCNGIGNRINQPPDQGVKIITHKECNTIGINGMLFNTNKEGTLPFYTPDDITLNNSVALNPIDISIELNKAKSDLEESKEWIRRSNQKLDSIEDKIEEILSKIYHIENEIARIKKLIGEAEPEA

SEQ ID NO: 89 - protein, 516 aa, Artificial Sequence
  PIV200322
MPISILLIITTMIMASHCQIDITKLQHVGVLVNSPKGMKISQNFETRYLILSLIPKIEDSNSCGDQQIKQYKRLLDRLIIPLYDGLRLQKDVIVTNQESNENTDPRTERFFGGVIGTIALGVATSAQITAAVALVEAKQARSDIEKLKEAIRDTNKAVQSVQSSVGNLIVAIKSVQDYVNKEIVPCIARLGCEACGLQLGIALTQHYSELTNIFGDNIGSLQEKGIKLQGIASLYRTNITEIFTTSTVDKYDIYDLLFTESIKVRVIDVDLNDYSITLQVRLPLLTRLLNTQIYKVDSISYNIQNREWYIPLPSHIMTKGAFLGGADVKECIEAPSSYICPSDPGFVLNHEMESCLSGNISQCPRTTVTSDIVPRYAFVNGGVVANCITTTCTCNGIGNRINQPPDQGVKIITHKECNTIGINGMLFNTNKEGTLAFYTPDDITLNNSVALNPIDISIELNKAKSDLEESKEWIRRSNQKLDSIEDKIEEILSKIYHIENEIARIKKLIGEAEPEA

SEQ ID NO: 90 - protein, 516 aa, Artificial Sequence
  PIV200323
MPISILLIITTMIMASHCQIDITKLQHVGVLVNSPKGMKISQNFETRYLILSLIPKIEDSNSCGDQQIKQYKRLLDRLIIPLYDGLRLQKDVIVTNQESNENTDPRTERFFGGVIGTIALGVATSAQITAAVALVEAKQARSDIEKLKEAIRDTNKAVQSVQSSVGNLIVAIKSVQDYVNKEIVPCIARLGCEACGLQLGIALTQHYSELTNIFGDNIGSLQEKGIKLQGIASLYRTNITEIFTTSTVDKYDIYDLLFTESIKVRVIDVDLNDYSITLQVRLPLLTRLLNTQIYKVDSISYNIQNREWYIPLPSHIMTKGAFLGGADVKECIEAFSSYICPSDPGFVLNHEMESCLSGNISQCPRTLVTSDIVPRYAFVNGGVVANCITTTCTCNGIGNRINQPPDQGVKIITHKECNTIGINGMLFNTNKEGTLAFYTPDDITLNNSVALNPIDISIELNKAKSDLEESKEWIRRSNQKLDSIEDKIEEILSKIYHIENEIARIKKLIGEAEPEA

SEQ ID NO: 91 - protein, 516 aa, Artificial Sequence
  PIV200324
MPISILLIITTMIMASHCQIDITKLQHVGVLVNSPKGMKISQNFETRYLILSLIPKIEDSNSCGDQQIKQYKRLLDRLIIPLYDGLRLMKDVIVTNQESNENTDPRTERFFGGVIGTIALGVATSAQITAAVALVEAKQARSDIEKLKEAIRDTNKAVQSVQSSVGNLIVAIKSVQDYVNKEIVPCIARLGCEACGLQLGIALTQHYSELTNIFGDNIGSLIEKGIKLQGIASLYRTNITEIFTTSTVDKYDIYDLLFTESIKVRVIDVDLNDYSITLQVRLPLLTRLLNTQIYKVDSISYNIQNREWYIPLPSHIMTKGAFLGGADVKECIEAFSSYICPSDPGFVLNHEMESCLSGNISQCPRTTVTSDIVPRYAFVNGGVVANCITTTCTCNGIGNRINQPPDQGVKIITHKECNTIGINGMLFNTNKEGTLAFYTPDDITLNNSVALNPIDISIELNKAKSDLEESKEWIRRSNQKLDSIEDKIEEILSKIYHIENEIARIKKLIGEAEPEA

SEQ ID NO: 92 - protein, 516 aa, Artificial Sequence; identical to SEQ ID NO: 6
  PIV200325

SEQ ID NO: 93 - protein, 516 aa, Artificial Sequence
  PIV200326
MPISILLIITTMIMASHCQIDITKLQHVGVLVNSPKGMKISQNFETRYLILSLIPKIEDSNSCGDQQIKQYKRLLDRLIIPLYDGLRLQKDVIVTNQESNENTDPRTERFFGGVIGTIALGVATSAQITAAVALVEAKQARSDIEKLKEAIRDTNKAVQSVQSSVGNLIVAIKSVQDYVNKEIVPCIARLGCEACGLLLGIALTQHYSELTNIFGDNIGSLQEKGIKLQGIASLYRTNITEIFTTSTVDKYDIYDLLFTESIKVRVIDVDLNDYSITLQVRLPLLTRLLNTQIYKVDSISYNIQNREWYIPLPSHIMTKGAFLGGADVKECIEAFSSYICPSDPGFVLNHEMESCLSGNISQCPRTTVTSDIVPRYAFVNGGVVANCITTTCTCNGIGNRINQPPDQGVKIITHKECNTIGINGMLFNTNKEGTLAFYTPDDITLNNSVALNPIDISIELNKAKSDLEESKEWIRRSNQKLDSIEDKIEEILSKIYHIENEIARIKKLIGEAEPEA

SEQ ID NO: 94 - protein, 516 aa, Artificial Sequence
  PIV200327
MPISILLIITTMIMASHCQIDITKLQHVGVLVNSPKGMKISQNFETRYLILSLIPKIEDSNSCGDQQIKQYKRLLDRLIIPLYDGLRLQKDVIVTNQESNENTDPRTERFFGGVIGTIALGVATSAQITAAVALVEAKQARSDIEKLKEAIRDTNKAVQSVQSSVGNLIVAIKSVQDYVNKEIVPCIARLGCEACGLQLGIALDQHYSELTNIFGDNIGSLQEKGIKLQGIASLYRTNITEIFTTSTVDKYDIYDLLFTESIKVRVIDVDLNDYSITLQVRLPLLTRLLNTQIYKVDSISYNIQNREWYIPLPSHIMTKGAFLGGADVKECIEAFSSYICPSDPGFVLNHEMESCLSGNISQCPRTTVTSDIVPRYAFVNGGVVANCITTTCTCNGIGNRINQPPDQGVKIITHKECNTIGINGMLFNTNKEGTLAFYTPDDITLNNSVALNPIDISIELNKAKSDLEESKEWIRRSNQKLDSIEDKIEEILSKIYHIENEIARIKKLIGEAEPEA

SEQ ID NO: 95 - protein, 516 aa, Artificial Sequence
  PIV200328
MPISILLIITTMIMASHCQIDITKLQHVGVLVNSPKGMKISQNFETRYLILSLIPKIEDSNSCGDQQIKQYKRLLDRLIIPLYDGLRLQKDVIVTNQESNENTDPRTERFFGGVIGTIALGVATSAQITAAVALVEAKQARSDIEKLKEAIRDTNKAVQSVQSSPGNLIVAIKSVQDYVNKEIVPSIARLGCEAAGLLLGIALTQHYSELTNIFGDNIGSLQEKGIKLQGIASLYRTNITEIFTTSTVDKYDIYDLLFTESIKVRVIDVDLNDYSITLQVRLPLLTRLLNTQIYKVDSISYNIQNREWYIPLPSHIMTKGAFLGGADVKECIEAFSSYICPSDPGFVLNHEMESCLSGNISQCPRTTVTSDIVPRYAFVNGGVVANCITTTCTCNGIGNRINQPPDQGVKIITHKECNTIGINGMLFNTNKEGTLAFYTPDDITLNNSVALNPIDISIELNKAKSDLEESKEWIRRSNQKLDSIEDKIEEILSKIYHIENEIARIKKLIGEAEPEA

SEQ ID NO: 96 - protein, 516 aa, Artificial Sequence
  PIV200329
MPISILLIITTMIMASHCQIDITKLQHVGVLVNSPKGMKISQNFETRYLILSLIPKIEDSNSCGDQQIKQYKRLLDRLIIPLYDGLRLQKDVIVTNQESNENTDPRTERFFGGVIGTIALGVATSAQITAAVALVEAKQARSDIEKLKEAIRDTNKAVQSVQSSPGNLIVAIKSVQDYVNKEIVPSIARLGCEAAGLQLGIALDQHYSELTNIFGDNIGSLQEKGIKLQGIASLYRTNITEIFTTSTVDKYDIYDLLFTESIKVRVIDVDLNDYSITLQVRLPLLTRLLNTQIYKVDSISYNIQNREWYIPLPSHIMTKGAFLGGADVKECIEAFSSYICPSDPGFVLNHEMESCLSGNISQCPRTTVTSDIVPRYAFVNGGVVANCITTTCTCNGIGNRINQPPDQGVKIITHKECNTIGINGMLFNTNKEGTLAFYTPDDITLNNSVALNPIDISIELNKAKSDLEESKEWIRRSNQKLDSIEDKIEEILSKIYHIENEIARIKKLIGEAEPEA

SEQ ID NO: 97 - protein, 516 aa, Artificial Sequence
  PIV200330
MPISILLIITTMIMASHCQIDITKLQHVGVLVNSPKGMKISQNFETRYLILSLIPKIEDSNSCGDQQIKQYKRLLDRLIIPLYDGLRLQKDVIVTNQESNENTDPRTERFFGGVIGTIALGVATSAQITAAVALVEAKQARSDIEKLKEAIRDTNKAVQSVQSSVGNLIVAIKSVQDYVNKEIVPSIARLGCEAAGLLLGIALDQHYSELTNIFGDNIGSLQEKGIKLQGIASLYRTNITEIFTTSTVDKYDIYDLLFTESIKVRVIDVDLNDYSITLQVRLPLLTRLLNTQIYKVDSISYNIQNREWYIPLPSHIMTKGAFLGGADVKECIEAFSSYICPSDPGFVLNHEMESCLSGNISQCPRTTVTSDIVPRYAFVNGGVVANCITTTCTCNGIGNRINQPPDQGVKIITHKECNTIGINGMLFNTNKEGTLAFYTPDDITLNNSVALNPIDISIELNKAKSDLEESKEWIRRSNQKLDSIEDKIEEILSKIYHIENEIARIKKLIGEAEPEA

SEQ ID NO: 98 - protein, 516 aa, Artificial Sequence
  PIV200721
MPISILLIITTMIMASHCQIDITKLQHVGVLVNSPKGMKISQNFETRYLILSLIPKIEDSNSCGDQQIKQYKRLLDRLIIPLYDGLRLQKDVIVTNQESNENTDPRTERFFGGVIGTIALGVATSAQITAAVALVEAKQARSDIEKLKEAIRDTNKAVQSVQSSVGNLIVAIKSVQDYVNKEIVPCIARLGCEACGLQLGIALTQHYSELTNIFGDNIGSLQEKGIKLQGIASLYRTNITEIFTTSTVDKYDIYDLLFTESIKVRVIDVDLNDYSITLQVRLPLLTRLLNTQIYKVDSISYNIQNREWYIPLPSHIMTKGAFLGGADVKECIEAFSSYICPSDPGFVLNHEMESCLSGNISQCPRTTVTSDIVPRYAFVNGGVVANCITTTCTCNGIGNRINQPPDQGVKIITHKECNTIGINGMLFNTNKEGTLAFYTPDDITLNNSVALNPIDISIELNKAKSDLEESKEWIRRSNQKLDSIEDKIEEILSKIYHIENEIARIKKLIGEAEPEA

SEQ ID NO: 99 - protein, 516 aa, Artificial Sequence
  PIV200722
MPISILLIITTMIMASHCQIDITKLQHVGVLVNSPKGMKISQNFETRYLILSLIPKIEDSNSCGDQQIKQYKRLLDRLIIPLYDGLRLQKDVIVTNQESNENTDPRTERFFGGVIGTIALGVATSAQITAAVALVEAKQARSDIEKLKEAIRDTNKAVQSVQSSPGNLIVAIKSVQDYVNKEIVPSIARLGCEAAGLQLGIALTQHYSELTNIFGDNIGSLQEKGIKLQGIASLYRTNITEIFTTSTVDKYDIYDLLFTESIKVRVIDVDLNDYSITLQVRLPLLTRLLNTQIYKVDSISYNIQNREWYIPLPSHIMTKGAFLGGADVKECIEAFSSYICPSDPGFVLNHEMESCLSGNISQCPRTTVTSDIVPRYAFVNGGVVANCITTTCTCNGIGNRINQPPDQGVKIITHKECNTIGINGMLFNTNKEGTLAFYTPDDITLNNSVALNPIDISIELNKAKSDLEESKEWIRRSNQKLDSIEDKIEEILSKIYHIENEIARIKKLIGEAEPEA

SEQ ID NO: 100 - protein, 516 aa, Artificial Sequence
  PIV200723
MPISILLIITTMIMASHCQIDITKLQHVGVLVNSPKGMKISQNFETRYLILSLIPKIEDSNSCGDQQIKQYKRLLDRLIIPLYDGLRLQKDVIVTNQESNENTDPRTERFFGGVIGTIALGVATSAQITAAVALVEAKQARSDIEKLKEAIRDTNKAVQSVQSSVGNLIVAIKSVQDYVNKEIVPSIARLGCEAAGLLLGIALTQHYSELTNIFGDNIGSLQEKGIKLQGIASLYRTNITEIFTTSTVDKYDIYDLLFTESIKVRVIDVDLNDYSITLQVRLPLLTRLLNTQIYKVDSISYNIQNREWYIPLPSHIMTKGAFLGGADVKECIEAFSSYICPSDPGFVLNHEMESCLSGNISQCPRTTVTSDIVPRYAFVNGGVVANCITTTCTCNGIGNRINQPPDQGVKIITHKECNTIGINGMLFNTNKEGTLAFYTPDDITLNNSVALNPIDISIELNKAKSDLEESKEWIRRSNQKLDSIEDKIEEILSKIYHIENEIARIKKLIGEAEPEA

SEQ ID NO: 101 - protein, 516 aa, Artificial Sequence
  PIV200724
MPISILLIITTMIMASHCQIDITKLQHVGVLVNSPKGMKISQNFETRYLILSLIPKIEDSNSCGDQQIKQYKRLLDRLIIPLYDGLRLQKDVIVTNQESNENTDPRTERFFGGVIGTIALGVATSAQITAAVALVEAKQARSDIEKLKEAIRDTNKAVQSVQSSVGNLIVAIKSVQDYVNKEIVPSIARLGCEAAGLQLGIALDQHYSELTNIFGDNIGSLQEKGIKLQGIASLYRTNITEIFTTSTVDKYDIYDLLFTESIKVRVIDVDLNDYSITLQVRLPLLTRLLNTQIYKVDSISYNIQNREWYIPLPSHIMTKGAFLGGADVKECIEAFSSYICPSDPGFVLNHEMESCLSGNISQCPRTTVTSDIVPRYAFVNGGVVANCITTTCTCNGIGNRINQPPDQGVKIITHKECNTIGINGMLFNTNKEGTLAFYTPDDITLNNSVALNPIDISIELNKAKSDLEESKEWIRRSNQKLDSIEDKIEEILSKIYHIENEIARIKKLIGEAEPEA

SEQ ID NO: 102 - protein, 516 aa, Artificial Sequence
  PIV200878
MPISILLIITTMIMASHCQIDITKLQHVGVLVNSPKGMKIPQNFETRYLILSLIPKIEDSNSCGDQQIKQYKRLLDRLIIPLYDGLRLMKDVIVTNQESNENTDPRTERFFGGVIGTIALGVATSAQITAAVALVEAKQARSDIEKLKEAIRDTNKAVQSVQSSVGNPIVAIKSVQDYVNKEIVPSIARLGCEAAGLQLGIALTQHYSELTNIFGDNIGSLIEKGIKLQGIASLYRTNITEIFTTSTVDKYDIYDLLFTESIKVRVIDVDLNDYSITLQVRLPLLTRLLNTQIYKVDSISYNIQNREWYIPLPSHIMTKGAFLGGADVKECIEAFSSYICPSDPGFVLNHEMESCLSGNISQCPRTTVTSDIVPRYAFVNGGVVANCITTTCTCNGIGNRINQPPDQGVKIITHKECNTIGINGMLFNTNKEGTLAFYTPDDITLNNSVALNPIDISIELNKAKSDLEESKEWIRRSNQKLDSIEDKIEEILSKIYHIENEIARIKKLIGEAEPEA

SEQ ID NO: 103 - protein, 516 aa, Artificial Sequence
  PIV200879
MPISILLIITTMIMASHCQIDITKLQHVGVLVNSPKGMKISQNFETRYLILSLIPKIEDSNSCGDQQIKQYKRLLDRLIIPLYDGLRLMKDVIVTNQESNENTDPRTERFFGGVIGTIALGVATSAQITAAVALVEAKQARSDIEKLKEAIRDTNKAVQSVQSSVGPPIVAIKSVQDYVNKEIVPSIARLGCEAAGLQLGIALTQHYSELTNIFGDNIGSLIEKGIKLQGIASLYRTNITEIFTTSTVDKYDIYDLLFTESIKVRVIDVDLNDYSITLQVRLPLLTRLLNTQIYKVDSISYNIQNREWYIPLPSHIMTKGAFLGGADVKECIEAFSSYICPSDPGFVLNHEMESCLSGNISQCPRTTVTSDIVPRYAFVNGGVVANCITTTCTCNGIGNRINQPPDQGVKIITHKECNTIGINGMLFNTNKEGTLAFYTPDDITLNNSVALNPIDISIELNKAKSDLEESKEWIRRSNQKLDSIEDKIEEILSKIYHIENEIARIKKLIGEAEPEA

SEQ ID NO: 104 - protein, 516 aa, Artificial Sequence
  PIV200880
MPISILLIITTMIMASHCQIDITKLQHVGVLVNSPKGMKISQNFETRYLILSLIPKIEDSNSCGDQQIKQYKRLLDRLIIPLYDGLRLMKDVIVTNQESNENTDPRTERFFGGVIGTIALGVATSAQITAAVALVEAKQARSDIEKLKEAIRDTNKAVQSVQSSVGNPIVAIKSVQDYVNKEIVPSIARLGCEAAGLLLGIALTQHYSELTNIFGDNIGSLIEKGIKLQGIASLYRTNITEIFTTSTVDKYDIYDLLFTESIKVRVIDVDLNDYSITLQVRLPLLTRLLNTQIYKVDSISYNIQNREWYIPLPSHIMTKGAFLGGADVKECIEAFSSYICPSDPGFVLNHEMESCLSGNISQCPRTTVTSDIVPRYAFVNGGVVANCITTTCTCNGIGNRINQPPDQGVKIITHKECNTIGINGMLFNTNKEGTLAFYTPDDITLNNSVALNPIDISIELNKAKSDLEESKEWIRRSNQKLDSIEDKIEEILSKIYHIENEIARIKKLIGEAEPEA

SEQ ID NO: 105 - protein, 516 aa, Artificial Sequence
  PIV200881
MPISILLIITTMIMASHCQIDITKLQHVGVLVNSPKGMKISQNFETRYLILSLIPKIEDSNSCGDQQIKQYKRLLDRLIIPLYDGLRLMKDVIVTNQESNENTDPRTERFFGGVIGTIALGVATSAQITAAVALVEAKQARSDIEKLKEAIRDTNKAVQSVQSSVGNPIVAIKSVQDYVNKEIVPSIARLGCEAAGLQLGIALDQHYSELTNIFGDNIGSLIEKGIKLQGIASLYRTNITEIFTTSTVDKYDIYDLLFTESIKVRVIDVDLNDYSITLQVRLPLLTRLLNTQIYKVDSISYNIQNREWYIPLPSHIMTKGAFLGGADVKECIEAFSSYICPSDPGFVLNHEMESCLSGNISQCPRTTVTSDIVPRYAFVNGGVVANCITTTCTCNGIGNRINQPPDQGVKIITHKECNTIGINGMLFNTNKEGTLAFYTPDDITLNNSVALNPIDISIELNKAKSDLEESKEWIRRSNQKLDSIEDKIEEILSKIYHIENEIARIKKLIGEAEPEA

SEQ ID NO: 106 - protein, 516 aa, Artificial Sequence
  PIV200882
MPISILLIITTMIMASHCQIDITKLQHVGVLVNSPKGMKISQNFETRYLILSLIPKIEDSNSCGDQQIKQYKRLLDRLIIPLYDGLRLMKDVIVTNQESNENTDPRTERFFGGVIGTIALGVATSAQITAAVALVEAKQARSDIEKLKEAIRDTNKAVQSVQSSVGNPIVAIKSVQDYVNKEIVPSIARLGCEAAGLQLGIALTQHYSELTNIFGDNIGSLIEKGIKLQGIASLYRTNITEIFTTSTVDKYDIYDLLFTESIKVRVIDVDLNDYSITLQVRLPLLTRLLNTQIYKVDSISYNIQNREWYIPLPSHIMTKGAFLGGADVKECIEAPSSYICPSDPGFVLNHEMESCLSGNISQCPRTTVTSDIVPRYAFVNGGVVANCITTTCTCNGIGNRINQPPDQGVKIITHKECNTIGINGMLFNTNKEGTLAFYTPDDITLNNSVALNPIDISIELNKAKSDLEESKEWIRRSNQKLDSIEDKIEEILSKIYHIENEIARIKKLIGEAEPEA

SEQ ID NO: 107 - protein, 516 aa, Artificial Sequence
  PIV200883
MPISILLIITTMIMASHCQIDITKLQHVGVLVNSPKGMKISQNFETRYLILSLIPKIEDSNSCGDQQIKQYKRLLDRLIIPLYDGLRLMKDVIVTNQESNENTDPRTERFFGGVIGTIALGVATSAQITAAVALVEAKQARSDIEKLKEAIRDTNKAVQSVQSSVGNPIVAIKSVQDYVNKEIVPCIARLGCEACGLQLGIALTQHYSELTNIFGDNIGSLIEKGIKLQGIASLYRTNITEIFTTSTVDKYDIYDLLFTESIKVRVIDVDLNDYSITLQVRLPLLTRLLNTQIYKVDSISYNIQNREWYIPLPSHIMTKGAFLGGADVKECIEAFSSYICPSDPGFVLNHEMESCLSGNISQCPRTTVTSDIVPRYAFVNGGVVANCITTTCTCNGIGNRINQPPDQGVKIITHKECNTIGINGMLFNTNKEGTLAFYTPDDITLNNSVALNPIDISIELNKAKSDLEESKEWIRRSNQKLDSIEDKIEEILSKIYHIENEIARIKKLIGEAEPEA

SEQ ID NO: 108 - protein, 516 aa, Artificial Sequence
  PIV200884
MPISILLIITTMIMASHCQIDITKLQHVGVLVNSPKGMKIPQNFETRYLILSLIPKIEDSNSCGDQQIKQYKRLLDRLIIPLYDGLRLMKDVIVTNQESNENTDPRTERFFGGVIGTIALGVATSAQITAAVALVEAKQARSDIEKLKEAIRDTNKAVQSVQSSVGPPIVAIKSVQDYVNKEIVPSIARLGCEAAGLQLGIALTQHYSELTNIFGDNIGSLIEKGIKLQGIASLYRTNITEIFTTSTVDKYDIYDLLFTESIKVRVIDVDLNDYSITLQVRLPLLTRLLNTQIYKVDSISYNIQNREWYIPLPSHIMTKGAFLGGADVKECIEAFSSYICPSDPGFVLNHEMESCLSGNISQCPRTTVTSDIVPRYAFVNGGVVANCITTTCTCNGIGNRINQPPDQGVKIITHKECNTIGINGMLFNTNKEGTLAFYTPDDITLNNSVALNPIDISIELNKAKSDLEESKEWIRRSNQKLDSIEDKIEEILSKIYHIENEIARIKKLIGEAEPEA

SEQ ID NO: 109 - protein, 516 aa, Artificial Sequence
  PIV200885
MPISILLIITTMIMASHCQIDITKLQHVGVLVNSPKGMKIPQNFETRYLILSLIPKIEDSNSCGDQQIKQYKRLLDRLIIPLYDGLRLMKDVIVTNQESNENTDPRTERFFGGVIGTIALGVATSAQITAAVALVEAKQARSDIEKLKEAIRDTNKAVQSVQSSVGNPIVAIKSVQDYVNKEIVPSIARLGCEAAGLLLGIALTQHYSELTNIFGDNIGSLIEKGIKLQGIASLYRTNITEIFTTSTVDKYDIYDLLFTESIKVRVIDVDLNDYSITLQVRLPLLTRLLNTQIYKVDSISYNIQNREWYIPLPSHIMTKGAFLGGADVKECIEAFSSYICPSDPGFVLNHEMESCLSGNISQCPRTTVTSDIVPRYAFVNGGVVANCITTTCTCNGIGNRINQPPDQGVKIITHKECNTIGINGMLFNTNKEGTLAFYTPDDITLNNSVALNPIDISIELNKAKSDLEESKEWIRRSNQKLDSIEDKIEEILSKIYHIENEIARIKKLIGEAEPEA

SEQ ID NO: 110 - protein, 516 aa, Artificial Sequence
  PIV200886
MPISILLIITTMIMASHCQIDITKLQHVGVLVNSPKGMKIPQNFETRYLILSLIPKIEDSNSCGDQQIKQYKRLLDRLIIPLYDGLRLMKDVIVTNQESNENTDPRTERFFGGVIGTIALGVATSAQITAAVALVEAKQARSDIEKLKEAIRDTNKAVQSVQSSVGNPIVAIKSVQDYVNKEIVPSIARLGCEAAGLQLGIALDQHYSELTNIFGDNIGSLIEKGIKLQGIASLYRTNITEIFTTSTVDKYDIYDLLFTESIKVRVIDVDLNDYSITLQVRLPLLTRLLNTQIYKVDSISYNIQNREWYIPLPSHIMTKGAFLGGADVKECIEAFSSYICPSDPGFVLNHEMESCLSGNISQCPRTTVTSDIVPRYAFVNGGVVANCITTTCTCNGIGNRINQPPDQGVKIITHKECNTIGINGMLFNTNKEGTLAFYTPDDITLNNSVALNPIDISIELNKAKSDLEESKEWIRRSNQKLDSIEDKIEEILSKIYHIENEIARIKKLIGEAEPEA

SEQ ID NO: 111 - protein, 516 aa, Artificial Sequence
  PIV200887
MPISILLIITTMIMASHCQIDITKLQHVGVLVNSPKGMKIPQNFETRYLILSLIPKIEDSNSCGDQQIKQYKRLLDRLIIPLYDGLRLMKDVIVTNQESNENTDPRTERFFGGVIGTIALGVATSAQITAAVALVEAKQARSDIEKLKEAIRDTNKAVQSVQSSVGNPIVAIKSVQDYVNKEIVPSIARLGCEAAGLQLGIALTQHYSELTNIFGDNIGSLIEKGIKLQGIASLYRTNITEIFTTSTVDKYDIYDLLFTESIKVRVIDVDLNDYSITLQVRLPLLTRLLNTQIYKVDSISYNIQNREWYIPLPSHIMTKGAFLGGADVKECIEAPSSYICPSDPGFVLNHEMESCLSGNISQCPRTTVTSDIVPRYAFVNGGVVANCITTTCTCNGIGNRINQPPDQGVKIITHKECNTIGINGMLFNTNKEGTLAFYTPDDITLNNSVALNPIDISIELNKAKSDLEESKEWIRRSNQKLDSIEDKIEEILSKIYHIENEIARIKKLIGEAEPEA

SEQ ID NO: 112 - protein, 516 aa, Artificial Sequence
  PIV200888
MPISILLIITTMIMASHCQIDITKLQHVGVLVNSPKGMKIPQNFETRYLILSLIPKIEDSNSCGDQQIKQYKRLLDRLIIPLYDGLRLMKDVIVTNQESNENTDPRTERFFGGVIGTIALGVATSAQITAAVALVEAKQARSDIEKLKEAIRDTNKAVQSVQSSVGNPIVAIKSVQDYVNKEIVPCIARLGCEACGLQLGIALTQHYSELTNIFGDNIGSLIEKGIKLQGIASLYRTNITEIFTTSTVDKYDIYDLLFTESIKVRVIDVDLNDYSITLQVRLPLLTRLLNTQIYKVDSISYNIQNREWYIPLPSHIMTKGAFLGGADVKECIEAFSSYICPSDPGFVLNHEMESCLSGNISQCPRTTVTSDIVPRYAFVNGGVVANCITTTCTCNGIGNRINQPPDQGVKIITHKECNTIGINGMLFNTNKEGTLAFYTPDDITLNNSVALNPIDISIELNKAKSDLEESKEWIRRSNQKLDSIEDKIEEILSKIYHIENEIARIKKLIGEAEPEA

SEQ ID NO: 113 - protein, 516 aa, Artificial Sequence
  PIV200889
MPISILLIITTMIMASHCQIDITKLQHVGVLVNSPKGMKISQNFETRYLILSLIPKIEDSNSCGDQQIKQYKRLLDRLIIPLYDGLRLMKDVIVTNQESNENTDPRTERFFGGVIGTIALGVATSAQITAAVALVEAKQARSDIEKLKEAIRDTNKAVQSVQSSVGPPIVAIKSVQDYVNKEIVPSIARLGCEAAGLLLGIALTQHYSELTNIFGDNIGSLIEKGIKLQGIASLYRTNITEIFTTSTVDKYDIYDLLFTESIKVRVIDVDLNDYSITLQVRLPLLTRLLNTQIYKVDSISYNIQNREWYIPLPSHIMTKGAFLGGADVKECIEAFSSYICPSDPGFVLNHEMESCLSGNISQCPRTTVTSDIVPRYAFVNGGVVANCITTTCTCNGIGNRINQPPDQGVKIITHKECNTIGINGMLFNTNKEGTLAFYTPDDITLNNSVALNPIDISIELNKAKSDLEESKEWIRRSNQKLDSIEDKIEEILSKIYHIENEIARIKKLIGEAEPEA

SEQ ID NO: 114 - protein, 516 aa, Artificial Sequence
  PIV200890
MPISILLIITTMIMASHCQIDITKLQHVGVLVNSPKGMKISQNFETRYLILSLIPKIEDSNSCGDQQIKQYKRLLDRLIIPLYDGLRLMKDVIVTNQESNENTDPRTERFFGGVIGTIALGVATSAQITAAVALVEAKQARSDIEKLKEAIRDTNKAVQSVQSSVGPPIVAIKSVQDYVNKEIVPSIARLGCEAAGLQLGIALDQHYSELTNIFGDNIGSLIEKGIKLQGIASLYRTNITEIFTTSTVDKYDIYDLLFTESIKVRVIDVDLNDYSITLQVRLPLLTRLLNTQIYKVDSISYNIQNREWYIPLPSHIMTKGAFLGGADVKECIEAFSSYICPSDPGFVLNHEMESCLSGNISQCPRTTVTSDIVPRYAFVNGGVVANCITTTCTCNGIGNRINQPPDQGVKIITHKECNTIGINGMLFNTNKEGTLAFYTPDDITLNNSVALNPIDISIELNKAKSDLEESKEWIRRSNQKLDSIEDKIEEILSKIYHIENEIARIKKLIGEAEPEA

SEQ ID NO: 115 - protein, 516 aa, Artificial Sequence
  PIV200891
MPISILLIITTMIMASHCQIDITKLQHVGVLVNSPKGMKISQNFETRYLILSLIPKIEDSNSCGDQQIKQYKRLLDRLIIPLYDGLRLMKDVIVTNQESNENTDPRTERFFGGVIGTIALGVATSAQITAAVALVEAKQARSDIEKLKEAIRDTNKAVQSVQSSVGPPIVAIKSVQDYVNKEIVPSIARLGCEAAGLQLGIALTQHYSELTNIFGDNIGSLIEKGIKLQGIASLYRTNITEIFTTSTVDKYDIYDLLFTESIKVRVIDVDLNDYSITLQVRLPLLTRLLNTQIYKVDSISYNIQNREWYIPLPSHIMTKGAFLGGADVKECIEAPSSYICPSDPGFVLNHEMESCLSGNISQCPRTTVTSDIVPRYAFVNGGVVANCITTTCTCNGIGNRINQPPDQGVKIITHKECNTIGINGMLFNTNKEGTLAFYTPDDITLNNSVALNPIDISIELNKAKSDLEESKEWIRRSNQKLDSIEDKIEEILSKIYHIENEIARIKKLIGEAEPEA

SEQ ID NO: 116 - protein, 516 aa, Artificial Sequence
  PIV200892
MPISILLIITTMIMASHCQIDITKLQHVGVLVNSPKGMKISQNFETRYLILSLIPKIEDSNSCGDQQIKQYKRLLDRLIIPLYDGLRLMKDVIVTNQESNENTDPRTERFFGGVIGTIALGVATSAQITAAVALVEAKQARSDIEKLKEAIRDTNKAVQSVQSSVGPPIVAIKSVQDYVNKEIVPCIARLGCEACGLQLGIALTQHYSELTNIFGDNIGSLIEKGIKLQGIASLYRTNITEIFTTSTVDKYDIYDLLFTESIKVRVIDVDLNDYSITLQVRLPLLTRLLNTQIYKVDSISYNIQNREWYIPLPSHIMTKGAFLGGADVKECIEAFSSYICPSDPGFVLNHEMESCLSGNISQCPRTTVTSDIVPRYAFVNGGVVANCITTTCTCNGIGNRINQPPDQGVKIITHKECNTIGINGMLFNTNKEGTLAFYTPDDITLNNSVALNPIDISIELNKAKSDLEESKEWIRRSNQKLDSIEDKIEEILSKIYHIENEIARIKKLIGEAEPEA

SEQ ID NO: 117 - protein, 516 aa, Artificial Sequence
  PIV200893
MPISILLIITTMIMASHCQIDITKLQHVGVLVNSPKGMKISQNFETRYLILSLIPKIEDSNSCGDQQIKQYKRLLDRLIIPLYDGLRLMKDVIVTNQESNENTDPRTERFFGGVIGTIALGVATSAQITAAVALVEAKQARSDIEKLKEAIRDTNKAVQSVQSSVGNPIVAIKSVQDYVNKEIVPSIARLGCEAAGLLLGIALDQHYSELTNIFGDNIGSLIEKGIKLQGIASLYRTNITEIFTTSTVDKYDIYDLLFTESIKVRVIDVDLNDYSITLQVRLPLLTRLLNTQIYKVDSISYNIQNREWYIPLPSHIMTKGAFLGGADVKECIEAFSSYICPSDPGFVLNHEMESCLSGNISQCPRTTVTSDIVPRYAFVNGGVVANCITTTCTCNGIGNRINQPPDQGVKIITHKECNTIGINGMLFNTNKEGTLAFYTPDDITLNNSVALNPIDISIELNKAKSDLEESKEWIRRSNQKLDSIEDKIEEILSKIYHIENEIARIKKLIGEAEPEA

SEQ ID NO: 118 - protein, 516 aa, Artificial Sequence
  PIV200894
MPISILLIITTMIMASHCQIDITKLQHVGVLVNSPKGMKISQNFETRYLILSLIPKIEDSNSCGDQQIKQYKRLLDRLIIPLYDGLRLMKDVIVTNQESNENTDPRTERFFGGVIGTIALGVATSAQITAAVALVEAKQARSDIEKLKEAIRDTNKAVQSVQSSVGNPIVAIKSVQDYVNKEIVPSIARLGCEAAGLLLGIALTQHYSELTNIFGDNIGSLIEKGIKLQGIASLYRTNITEIFTTSTVDKYDIYDLLFTESIKVRVIDVDLNDYSITLQVRLPLLTRLLNTQIYKVDSISYNIQNREWYIPLPSHIMTKGAFLGGADVKECIEAPSSYICPSDPGFVLNHEMESCLSGNISQCPRTTVTSDIVPRYAFVNGGVVANCITTTCTCNGIGNRINQPPDQGVKIITHKECNTIGINGMLFNTNKEGTLAFYTPDDITLNNSVALNPIDISIELNKAKSDLEESKEWIRRSNQKLDSIEDKIEEILSKIYHIENEIARIKKLIGEAEPEA

SEQ ID NO: 119 - protein, 516 aa, Artificial Sequence
  PIV200895
MPISILLIITTMIMASHCQIDITKLQHVGVLVNSPKGMKISQNFETRYLILSLIPKIEDSNSCGDQQIKQYKRLLDRLIIPLYDGLRLMKDVIVTNQESNENTDPRTERFFGGVIGTIALGVATSAQITAAVALVEAKQARSDIEKLKEAIRDTNKAVQSVQSSVGNPIVAIKSVQDYVNKEIVPCIARLGCEACGLLLGIALTQHYSELTNIFGDNIGSLIEKGIKLQGIASLYRTNITEIFTTSTVDKYDIYDLLFTESIKVRVIDVDLNDYSITLQVRLPLLTRLLNTQIYKVDSISYNIQNREWYIPLPSHIMTKGAFLGGADVKECIEAFSSYICPSDPGFVLNHEMESCLSGNISQCPRTTVTSDIVPRYAFVNGGVVANCITTTCTCNGIGNRINQPPDQGVKIITHKECNTIGINGMLFNTNKEGTLAFYTPDDITLNNSVALNPIDISIELNKAKSDLEESKEWIRRSNQKLDSIEDKIEEILSKIYHIENEIARIKKLIGEAEPEA

SEQ ID NO: 120 - protein, 516 aa, Artificial Sequence
  PIV200896
MPISILLIITTMIMASHCQIDITKLQHVGVLVNSPKGMKISQNFETRYLILSLIPKIEDSNSCGDQQIKQYKRLLDRLIIPLYDGLRLMKDVIVTNQESNENTDPRTERFFGGVIGTIALGVATSAQITAAVALVEAKQARSDIEKLKEAIRDTNKAVQSVQSSVGNPIVAIKSVQDYVNKEIVPSIARLGCEAAGLQLGIALDQHYSELTNIFGDNIGSLIEKGIKLQGIASLYRTNITEIFTTSTVDKYDIYDLLFTESIKVRVIDVDLNDYSITLQVRLPLLTRLLNTQIYKVDSISYNIQNREWYIPLPSHIMTKGAFLGGADVKECIEAPSSYICPSDPGFVLNHEMESCLSGNISQCPRTTVTSDIVPRYAFVNGGVVANCITTTCTCNGIGNRINQPPDQGVKIITHKECNTIGINGMLFNTNKEGTLAFYTPDDITLNNSVALNPIDISIELNKAKSDLEESKEWIRRSNQKLDSIEDKIEEILSKIYHIENEIARIKKLIGEAEPEA

SEQ ID NO: 121 - protein, 516 aa, Artificial Sequence
  PIV200897
MPISILLIITTMIMASHCQIDITKLQHVGVLVNSPKGMKISQNFETRYLILSLIPKIEDSNSCGDQQIKQYKRLLDRLIIPLYDGLRLMKDVIVTNQESNENTDPRTERFFGGVIGTIALGVATSAQITAAVALVEAKQARSDIEKLKEAIRDTNKAVQSVQSSVGNPIVAIKSVQDYVNKEIVPCIARLGCEACGLQLGIALDQHYSELTNIFGDNIGSLIEKGIKLQGIASLYRTNITEIFTTSTVDKYDIYDLLFTESIKVRVIDVDLNDYSITLQVRLPLLTRLLNTQIYKVDSISYNIQNREWYIPLPSHIMTKGAFLGGADVKECIEAFSSYICPSDPGFVLNHEMESCLSGNISQCPRTTVTSDIVPRYAFVNGGVVANCITTTCTCNGIGNRINQPPDQGVKIITHKECNTIGINGMLFNTNKEGTLAFYTPDDITLNNSVALNPIDISIELNKAKSDLEESKEWIRRSNQKLDSIEDKIEEILSKIYHIENEIARIKKLIGEAEPEA

SEQ ID NO: 122 - protein, 516 aa, Artificial Sequence
  PIV200898
MPISILLIITTMIMASHCQIDITKLQHVGVLVNSPKGMKISQNFETRYLILSLIPKIEDSNSCGDQQIKQYKRLLDRLIIPLYDGLRLMKDVIVTNQESNENTDPRTERFFGGVIGTIALGVATSAQITAAVALVEAKQARSDIEKLKEAIRDTNKAVQSVQSSVGNPIVAIKSVQDYVNKEIVPCIARLGCEACGLQLGIALTQHYSELTNIFGDNIGSLIEKGIKLQGIASLYRTNITEIFTTSTVDKYDIYDLLFTESIKVRVIDVDLNDYSITLQVRLPLLTRLLNTQIYKVDSISYNIQNREWYIPLPSHIMTKGAFLGGADVKECIEAPSSYICPSDPGFVLNHEMESCLSGNISQCPRTTVTSDIVPRYAFVNGGVVANCITTTCTCNGIGNRINQPPDQGVKIITHKECNTIGINGMLFNTNKEGTLAFYTPDDITLNNSVALNPIDISIELNKAKSDLEESKEWIRRSNQKLDSIEDKIEEILSKIYHIENEIARIKKLIGEAEPEA

SEQ ID NO: 123 - protein, 516 aa, Artificial Sequence
  PIV200899
MPISILLIITTMIMASHCQIDITKLQHVGVLVNSPKGMKIPQNFETRYLILSLIPKIEDSNSCGDQQIKQYKRLLDRLIIPLYDGLRLMKDVIVTNQESNENTDPRTERFFGGVIGTIALGVATSAQITAAVALVEAKQARSDIEKLKEAIRDTNKAVQSVQSSVGPPIVAIKSVQDYVNKEIVPSIARLGCEAAGLLLGIALTQHYSELTNIFGDNIGSLIEKGIKLQGIASLYRTNITEIFTTSTVDKYDIYDLLFTESIKVRVIDVDLNDYSITLQVRLPLLTRLLNTQIYKVDSISYNIQNREWYIPLPSHIMTKGAFLGGADVKECIEAFSSYICPSDPGFVLNHEMESCLSGNISQCPRTTVTSDIVPRYAFVNGGVVANCITTTCTCNGIGNRINQPPDQGVKIITHKECNTIGINGMLFNTNKEGTLAFYTPDDITLNNSVALNPIDISIELNKAKSDLEESKEWIRRSNQKLDSIEDKIEEILSKIYHIENEIARIKKLIGEAEPEA

SEQ ID NO: 124 - protein, 516 aa, Artificial Sequence
  PIV200900
MPISILLIITTMIMASHCQIDITKLQHVGVLVNSPKGMKIPQNFETRYLILSLIPKIEDSNSCGDQQIKQYKRLLDRLIIPLYDGLRLMKDVIVTNQESNENTDPRTERFFGGVIGTIALGVATSAQITAAVALVEAKQARSDIEKLKEAIRDTNKAVQSVQSSVGPPIVAIKSVQDYVNKEIVPSIARLGCEAAGLQLGIALDQHYSELTNIFGDNIGSLIEKGIKLQGIASLYRTNITEIFTTSTVDKYDIYDLLFTESIKVRVIDVDLNDYSITLQVRLPLLTRLLNTQIYKVDSISYNIQNREWYIPLPSHIMTKGAFLGGADVKECIEAFSSYICPSDPGFVLNHEMESCLSGNISQCPRTTVTSDIVPRYAFVNGGVVANCITTTCTCNGIGNRINQPPDQGVKIITHKECNTIGINGMLFNTNKEGTLAFYTPDDITLNNSVALNPIDISIELNKAKSDLEESKEWIRRSNQKLDSIEDKIEEILSKIYHIENEIARIKKLIGEAEPEA

SEQ ID NO: 125 - protein, 516 aa, Artificial Sequence
  PIV200901
MPISILLIITTMIMASHCQIDITKLQHVGVLVNSPKGMKIPQNFETRYLILSLIPKIEDSNSCGDQQIKQYKRLLDRLIIPLYDGLRLMKDVIVTNQESNENTDPRTERFFGGVIGTIALGVATSAQITAAVALVEAKQARSDIEKLKEAIRDTNKAVQSVQSSVGPPIVAIKSVQDYVNKEIVPSIARLGCEAAGLQLGIALTQHYSELTNIFGDNIGSLIEKGIKLQGIASLYRTNITEIFTTSTVDKYDIYDLLFTESIKVRVIDVDLNDYSITLQVRLPLLTRLLNTQIYKVDSISYNIQNREWYIPLPSHIMTKGAFLGGADVKECIEAPSSYICPSDPGFVLNHEMESCLSGNISQCPRTTVTSDIVPRYAFVNGGVVANCITTTCTCNGIGNRINQPPDQGVKIITHKECNTIGINGMLFNTNKEGTLAFYTPDDITLNNSVALNPIDISIELNKAKSDLEESKEWIRRSNQKLDSIEDKIEEILSKIYHIENEIARIKKLIGEAEPEA

SEQ ID NO: 126 - protein, 516 aa, Artificial Sequence
  PIV200902
MPISILLIITTMIMASHCQIDITKLQHVGVLVNSPKGMKIPQNFETRYLILSLIPKIEDSNSCGDQQIKQYKRLLDRLIIPLYDGLRLMKDVIVTNQESNENTDPRTERFFGGVIGTIALGVATSAQITAAVALVEAKQARSDIEKLKEAIRDTNKAVQSVQSSVGPPIVAIKSVQDYVNKEIVPCIARLGCEACGLQLGIALTQHYSELTNIFGDNIGSLIEKGIKLQGIASLYRTNITEIFTTSTVDKYDIYDLLFTESIKVRVIDVDLNDYSITLQVRLPLLTRLLNTQIYKVDSISYNIQNREWYIPLPSHIMTKGAFLGGADVKECIEAFSSYICPSDPGFVLNHEMESCLSGNISQCPRTTVTSDIVPRYAFVNGGVVANCITTTCTCNGIGNRINQPPDQGVKIITHKECNTIGINGMLFNTNKEGTLAFYTPDDITLNNSVALNPIDISIELNKAKSDLEESKEWIRRSNQKLDSIEDKIEEILSKIYHIENEIARIKKLIGEAEPEA

SEQ ID NO: 127 - protein, 516 aa, Artificial Sequence
  PIV200903
MPISILLIITTMIMASHCQIDITKLQHVGVLVNSPKGMKIPQNFETRYLILSLIPKIEDSNSCGDQQIKQYKRLLDRLIIPLYDGLRLMKDVIVTNQESNENTDPRTERFFGGVIGTIALGVATSAQITAAVALVEAKQARSDIEKLKEAIRDTNKAVQSVQSSVGNPIVAIKSVQDYVNKEIVPSIARLGCEAAGLLLGIALDQHYSELTNIFGDNIGSLIEKGIKLQGIASLYRTNITEIFTTSTVDKYDIYDLLFTESIKVRVIDVDLNDYSITLQVRLPLLTRLLNTQIYKVDSISYNIQNREWYIPLPSHIMTKGAFLGGADVKECIEAFSSYICPSDPGFVLNHEMESCLSGNISQCPRTTVTSDIVPRYAFVNGGVVANCITTTCTCNGIGNRINQPPDQGVKIITHKECNTIGINGMLFNTNKEGTLAFYTPDDITLNNSVALNPIDISIELNKAKSDLEESKEWIRRSNQKLDSIEDKIEEILSKIYHIENEIARIKKLIGEAEPEA

SEQ ID NO: 128 - protein, 516 aa, Artificial Sequence
  PIV200904
MPISILLIITTMIMASHCQIDITKLQHVGVLVNSPKGMKIPQNFETRYLILSLIPKIEDSNSCGDQQIKQYKRLLDRLIIPLYDGLRLMKDVIVTNQESNENTDPRTERFFGGVIGTIALGVATSAQITAAVALVEAKQARSDIEKLKEAIRDTNKAVQSVQSSVGNPIVAIKSVQDYVNKEIVPSIARLGCEAAGLLLGIALTQHYSELTNIFGDNIGSLIEKGIKLQGIASLYRTNITEIFTTSTVDKYDIYDLLFTESIKVRVIDVDLNDYSITLQVRLPLLTRLLNTQIYKVDSISYNIQNREWYIPLPSHIMTKGAFLGGADVKECIEAPSSYICPSDPGFVLNHEMESCLSGNISQCPRTTVTSDIVPRYAFVNGGVVANCITTTCTCNGIGNRINQPPDQGVKIITHKECNTIGINGMLFNTNKEGTLAFYTPDDITLNNSVALNPIDISIELNKAKSDLEESKEWIRRSNQKLDSIEDKIEEILSKIYHIENEIARIKKLIGEAEPEA

SEQ ID NO: 129 - protein, 516 aa, Artificial Sequence
  PIV200905
MPISILLIITTMIMASHCQIDITKLQHVGVLVNSPKGMKIPQNFETRYLILSLIPKIEDSNSCGDQQIKQYKRLLDRLIIPLYDGLRLMKDVIVTNQESNENTDPRTERFFGGVIGTIALGVATSAQITAAVALVEAKQARSDIEKLKEAIRDTNKAVQSVQSSVGNPIVAIKSVQDYVNKEIVPCIARLGCEACGLLLGIALTQHYSELTNIFGDNIGSLIEKGIKLQGIASLYRTNITEIFTTSTVDKYDIYDLLFTESIKVRVIDVDLNDYSITLQVRLPLLTRLLNTQIYKVDSISYNIQNREWYIPLPSHIMTKGAFLGGADVKECIEAFSSYICPSDPGFVLNHEMESCLSGNISQCPRTTVTSDIVPRYAFVNGGVVANCITTTCTCNGIGNRINQPPDQGVKIITHKECNTIGINGMLFNTNKEGTLAFYTPDDITLNNSVALNPIDISIELNKAKSDLEESKEWIRRSNQKLDSIEDKIEEILSKIYHIENEIARIKKLIGEAEPEA

SEQ ID NO: 130 - protein, 516 aa, Artificial Sequence
  PIV200906
MPISILLIITTMIMASHCQIDITKLQHVGVLVNSPKGMKIPQNFETRYLILSLIPKIEDSNSCGDQQIKQYKRLLDRLIIPLYDGLRLMKDVIVTNQESNENTDPRTERFFGGVIGTIALGVATSAQITAAVALVEAKQARSDIEKLKEAIRDTNKAVQSVQSSVGNPIVAIKSVQDYVNKEIVPSIARLGCEAAGLQLGIALDQHYSELTNIFGDNIGSLIEKGIKLQGIASLYRTNITEIFTTSTVDKYDIYDLLFTESIKVRVIDVDLNDYSITLQVRLPLLTRLLNTQIYKVDSISYNIQNREWYIPLPSHIMTKGAFLGGADVKECIEAPSSYICPSDPGFVLNHEMESCLSGNISQCPRTTVTSDIVPRYAFVNGGVVANCITTTCTCNGIGNRINQPPDQGVKIITHKECNTIGINGMLFNTNKEGTLAFYTPDDITLNNSVALNPIDISIELNKAKSDLEESKEWIRRSNQKLDSIEDKIEEILSKIYHIENEIARIKKLIGEAEPEA

SEQ ID NO: 131 - protein, 516 aa, Artificial Sequence
  PIV200907
MPISILLIITTMIMASHCQIDITKLQHVGVLVNSPKGMKIPQNFETRYLILSLIPKIEDSNSCGDQQIKQYKRLLDRLIIPLYDGLRLMKDVIVTNQESNENTDPRTERFFGGVIGTIALGVATSAQITAAVALVEAKQARSDIEKLKEAIRDTNKAVQSVQSSVGNPIVAIKSVQDYVNKEIVPCIARLGCEACGLQLGIALDQHYSELTNIFGDNIGSLIEKGIKLQGIASLYRTNITEIFTTSTVDKYDIYDLLFTESIKVRVIDVDLNDYSITLQVRLPLLTRLLNTQIYKVDSISYNIQNREWYIPLPSHIMTKGAFLGGADVKECIEAFSSYICPSDPGFVLNHEMESCLSGNISQCPRTTVTSDIVPRYAFVNGGVVANCITTTCTCNGIGNRINQPPDQGVKIITHKECNTIGINGMLFNTNKEGTLAFYTPDDITLNNSVALNPIDISIELNKAKSDLEESKEWIRRSNQKLDSIEDKIEEILSKIYHIENEIARIKKLIGEAEPEA

SEQ ID NO: 132 - protein, 516 aa, Artificial Sequence
  PIV200908
MPISILLIITTMIMASHCQIDITKLQHVGVLVNSPKGMKIPQNFETRYLILSLIPKIEDSNSCGDQQIKQYKRLLDRLIIPLYDGLRLMKDVIVTNQESNENTDPRTERFFGGVIGTIALGVATSAQITAAVALVEAKQARSDIEKLKEAIRDTNKAVQSVQSSVGNPIVAIKSVQDYVNKEIVPCIARLGCEACGLQLGIALTQHYSELTNIFGDNIGSLIEKGIKLQGIASLYRTNITEIFTTSTVDKYDIYDLLFTESIKVRVIDVDLNDYSITLQVRLPLLTRLLNTQIYKVDSISYNIQNREWYIPLPSHIMTKGAFLGGADVKECIEAPSSYICPSDPGFVLNHEMESCLSGNISQCPRTTVTSDIVPRYAFVNGGVVANCITTTCTCNGIGNRINQPPDQGVKIITHKECNTIGINGMLFNTNKEGTLAFYTPDDITLNNSVALNPIDISIELNKAKSDLEESKEWIRRSNQKLDSIEDKIEEILSKIYHIENEIARIKKLIGEAEPEA

SEQ ID NO: 133 - protein, 516 aa, Artificial Sequence
  PIV200909
MPISILLIITTMIMASHCQIDITKLQHVGVLVNSPKGMKISQNFETRYLILSLIPKIEDSNSCGDQQIKQYKRLLDRLIIPLYDGLRLMKDVIVTNQESNENTDPRTERFFGGVIGTIALGVATSAQITAAVALVEAKQARSDIEKLKEAIRDTNKAVQSVQSSVGPPIVAIKSVQDYVNKEIVPSIARLGCEAAGLLLGIALDQHYSELTNIFGDNIGSLIEKGIKLQGIASLYRTNITEIFTTSTVDKYDIYDLLFTESIKVRVIDVDLNDYSITLQVRLPLLTRLLNTQIYKVDSISYNIQNREWYIPLPSHIMTKGAFLGGADVKECIEAFSSYICPSDPGFVLNHEMESCLSGNISQCPRTTVTSDIVPRYAFVNGGVVANCITTTCTCNGIGNRINQPPDQGVKIITHKECNTIGINGMLFNTNKEGTLAFYTPDDITLNNSVALNPIDISIELNKAKSDLEESKEWIRRSNQKLDSIEDKIEEILSKIYHIENEIARIKKLIGEAEPEA

SEQ ID NO: 134 - protein, 516 aa, Artificial Sequence
  PIV200910
MPISILLIITTMIMASHCQIDITKLQHVGVLVNSPKGMKISQNFETRYLILSLIPKIEDSNSCGDQQIKQYKRLLDRLIIPLYDGLRLMKDVIVTNQESNENTDPRTERFFGGVIGTIALGVATSAQITAAVALVEAKQARSDIEKLKEAIRDTNKAVQSVQSSVGPPIVAIKSVQDYVNKEIVPSIARLGCEAAGLLLGIALTQHYSELTNIFGDNIGSLIEKGIKLQGIASLYRTNITEIFTTSTVDKYDIYDLLFTESIKVRVIDVDLNDYSITLQVRLPLLTRLLNTQIYKVDSISYNIQNREWYIPLPSHIMTKGAFLGGADVKECIEAPSSYICPSDPGFVLNHEMESCLSGNISQCPRTTVTSDIVPRYAFVNGGVVANCITTTCTCNGIGNRINQPPDQGVKIITHKECNTIGINGMLFNTNKEGTLAFYTPDDITLNNSVALNPIDISIELNKAKSDLEESKEWIRRSNQKLDSIEDKIEEILSKIYHIENEIARIKKLIGEAEPEA

SEQ ID NO: 135 - protein, 516 aa, Artificial Sequence
  PIV200911
MPISILLIITTMIMASHCQIDITKLQHVGVLVNSPKGMKISQNFETRYLILSLIPKIEDSNSCGDQQIKQYKRLLDRLIIPLYDGLRLMKDVIVTNQESNENTDPRTERFFGGVIGTIALGVATSAQITAAVALVEAKQARSDIEKLKEAIRDTNKAVQSVQSSVGPPIVAIKSVQDYVNKEIVPCIARLGCEACGLLLGIALTQHYSELTNIFGDNIGSLIEKGIKLQGIASLYRTNITEIFTTSTVDKYDIYDLLFTESIKVRVIDVDLNDYSITLQVRLPLLTRLLNTQIYKVDSISYNIQNREWYIPLPSHIMTKGAFLGGADVKECIEAFSSYICPSDPGFVLNHEMESCLSGNISQCPRTTVTSDIVPRYAFVNGGVVANCITTTCTCNGIGNRINQPPDQGVKIITHKECNTIGINGMLFNTNKEGTLAFYTPDDITLNNSVALNPIDISIELNKAKSDLEESKEWIRRSNQKLDSIEDKIEEILSKIYHIENEIARIKKLIGEAEPEA

SEQ ID NO: 136 - protein, 516 aa, Artificial Sequence
  PIV200912
MPISILLIITTMIMASHCQIDITKLQHVGVLVNSPKGMKISQNFETRYLILSLIPKIEDSNSCGDQQIKQYKRLLDRLIIPLYDGLRLMKDVIVTNQESNENTDPRTERFFGGVIGTIALGVATSAQITAAVALVEAKQARSDIEKLKEAIRDTNKAVQSVQSSVGPPIVAIKSVQDYVNKEIVPSIARLGCEAAGLQLGIALDQHYSELTNIFGDNIGSLIEKGIKLQGIASLYRTNITEIFTTSTVDKYDIYDLLFTESIKVRVIDVDLNDYSITLQVRLPLLTRLLNTQIYKVDSISYNIQNREWYIPLPSHIMTKGAFLGGADVKECIEAPSSYICPSDPGFVLNHEMESCLSGNISQCPRTTVTSDIVPRYAFVNGGVVANCITTTCTCNGIGNRINQPPDQGVKIITHKECNTIGINGMLFNTNKEGTLAFYTPDDITLNNSVALNPIDISIELNKAKSDLEESKEWIRRSNQKLDSIEDKIEEILSKIYHIENEIARIKKLIGEAEPEA

SEQ ID NO: 137 - protein, 516 aa, Artificial Sequence
  PIV200913
MPISILLIITTMIMASHCQIDITKLQHVGVLVNSPKGMKISQNFETRYLILSLIPKIEDSNSCGDQQIKQYKRLLDRLIIPLYDGLRLMKDVIVTNQESNENTDPRTERFFGGVIGTIALGVATSAQITAAVALVEAKQARSDIEKLKEAIRDTNKAVQSVQSSVGPPIVAIKSVQDYVNKEIVPCIARLGCEACGLQLGIALDQHYSELTNIFGDNIGSLIEKGIKLQGIASLYRTNITEIFTTSTVDKYDIYDLLFTESIKVRVIDVDLNDYSITLQVRLPLLTRLLNTQIYKVDSISYNIQNREWYIPLPSHIMTKGAFLGGADVKECIEAFSSYICPSDPGFVLNHEMESCLSGNISQCPRTTVTSDIVPRYAFVNGGVVANCITTTCTCNGIGNRINQPPDQGVKIITHKECNTIGINGMLFNTNKEGTLAFYTPDDITLNNSVALNPIDISIELNKAKSDLEESKEWIRRSNQKLDSIEDKIEEILSKIYHIENEIARIKKLIGEAEPEA

SEQ ID NO: 138 - protein, 516 aa, Artificial Sequence
  PIV200914
MPISILLIITTMIMASHCQIDITKLQHVGVLVNSPKGMKISQNFETRYLILSLIPKIEDSNSCGDQQIKQYKRLLDRLIIPLYDGLRLMKDVIVTNQESNENTDPRTERFFGGVIGTIALGVATSAQITAAVALVEAKQARSDIEKLKEAIRDTNKAVQSVQSSVGPPIVAIKSVQDYVNKEIVPCIARLGCEACGLQLGIALTQHYSELTNIFGDNIGSLIEKGIKLQGIASLYRTNITEIFTTSTVDKYDIYDLLFTESIKVRVIDVDLNDYSITLQVRLPLLTRLLNTQIYKVDSISYNIQNREWYIPLPSHIMTKGAFLGGADVKECIEAPSSYICPSDPGFVLNHEMESCLSGNISQCPRTTVTSDIVPRYAFVNGGVVANCITTTCTCNGIGNRINQPPDQGVKIITHKECNTIGINGMLFNTNKEGTLAFYTPDDITLNNSVALNPIDISIELNKAKSDLEESKEWIRRSNQKLDSIEDKIEEILSKIYHIENEIARIKKLIGEAEPEA

SEQ ID NO: 139 - protein, 516 aa, Artificial Sequence
  PIV200915
MPISILLIITTMIMASHCQIDITKLQHVGVLVNSPKGMKISQNFETRYLILSLIPKIEDSNSCGDQQIKQYKRLLDRLIIPLYDGLRLMKDVIVTNQESNENTDPRTERFFGGVIGTIALGVATSAQITAAVALVEAKQARSDIEKLKEAIRDTNKAVQSVQSSVGNPIVAIKSVQDYVNKEIVPSIARLGCEAAGLLLGIALDQHYSELTNIFGDNIGSLIEKGIKLQGIASLYRTNITEIFTTSTVDKYDIYDLLFTESIKVRVIDVDLNDYSITLQVRLPLLTRLLNTQIYKVDSISYNIQNREWYIPLPSHIMTKGAFLGGADVKECIEAPSSYICPSDPGFVLNHEMESCLSGNISQCPRTTVTSDIVPRYAFVNGGVVANCITTTCTCNGIGNRINQPPDQGVKIITHKECNTIGINGMLFNTNKEGTLAFYTPDDITLNNSVALNPIDISIELNKAKSDLEESKEWIRRSNQKLDSIEDKIEEILSKIYHIENEIARIKKLIGEAEPEA

SEQ ID NO: 140 - protein, 516 aa, Artificial Sequence
  PIV200916
MPISILLIITTMIMASHCQIDITKLQHVGVLVNSPKGMKISQNFETRYLILSLIPKIEDSNSCGDQQIKQYKRLLDRLIIPLYDGLRLMKDVIVTNQESNENTDPRTERFFGGVIGTIALGVATSAQITAAVALVEAKQARSDIEKLKEAIRDTNKAVQSVQSSVGNPIVAIKSVQDYVNKEIVPCIARLGCEACGLLLGIALDQHYSELTNIFGDNIGSLIEKGIKLQGIASLYRTNITEIFTTSTVDKYDIYDLLFTESIKVRVIDVDLNDYSITLQVRLPLLTRLLNTQIYKVDSISYNIQNREWYIPLPSHIMTKGAFLGGADVKECIEAFSSYICPSDPGFVLNHEMESCLSGNISQCPRTTVTSDIVPRYAFVNGGVVANCITTTCTCNGIGNRINQPPDQGVKIITHKECNTIGINGMLFNTNKEGTLAFYTPDDITLNNSVALNPIDISIELNKAKSDLEESKEWIRRSNQKLDSIEDKIEEILSKIYHIENEIARIKKLIGEAEPEA

SEQ ID NO: 141 - protein, 516 aa, Artificial Sequence
  PIV200917
MPISILLIITTMIMASHCQIDITKLQHVGVLVNSPKGMKISQNFETRYLILSLIPKIEDSNSCGDQQIKQYKRLLDRLIIPLYDGLRLMKDVIVTNQESNENTDPRTERFFGGVIGTIALGVATSAQITAAVALVEAKQARSDIEKLKEAIRDTNKAVQSVQSSVGNPIVAIKSVQDYVNKEIVPCIARLGCEACGLLLGIALTQHYSELTNIFGDNIGSLIEKGIKLQGIASLYRTNITEIFTTSTVDKYDIYDLLFTESIKVRVIDVDLNDYSITLQVRLPLLTRLLNTQIYKVDSISYNIQNREWYIPLPSHIMTKGAFLGGADVKECIEAPSSYICPSDPGFVLNHEMESCLSGNISQCPRTTVTSDIVPRYAFVNGGVVANCITTTCTCNGIGNRINQPPDQGVKIITHKECNTIGINGMLFNTNKEGTLAFYTPDDITLNNSVALNPIDISIELNKAKSDLEESKEWIRRSNQKLDSIEDKIEEILSKIYHIENEIARIKKLIGEAEPEA

SEQ ID NO: 142 - protein, 516 aa, Artificial Sequence
  PIV200918
MPISILLIITTMIMASHCQIDITKLQHVGVLVNSPKGMKISQNFETRYLILSLIPKIEDSNSCGDQQIKQYKRLLDRLIIPLYDGLRLMKDVIVTNQESNENTDPRTERFFGGVIGTIALGVATSAQITAAVALVEAKQARSDIEKLKEAIRDTNKAVQSVQSSVGNPIVAIKSVQDYVNKEIVPCIARLGCEACGLQLGIALDQHYSELTNIFGDNIGSLIEKGIKLQGIASLYRTNITEIFTTSTVDKYDIYDLLFTESIKVRVIDVDLNDYSITLQVRLPLLTRLLNTQIYKVDSISYNIQNREWYIPLPSHIMTKGAFLGGADVKECIEAPSSYICPSDPGFVLNHEMESCLSGNISQCPRTTVTSDIVPRYAFVNGGVVANCITTTCTCNGIGNRINQPPDQGVKIITHKECNTIGINGMLFNTNKEGTLAFYTPDDITLNNSVALNPIDISIELNKAKSDLEESKEWIRRSNQKLDSIEDKIEEILSKIYHIENEIARIKKLIGEAEPEA

SEQ ID NO: 143 - protein, 516 aa, Artificial Sequence
  PIV200919
MPISILLIITTMIMASHCQIDITKLQHVGVLVNSPKGMKIPQNFETRYLILSLIPKIEDSNSCGDQQIKQYKRLLDRLIIPLYDGLRLMKDVIVTNQESNENTDPRTERFFGGVIGTIALGVATSAQITAAVALVEAKQARSDIEKLKEAIRDTNKAVQSVQSSVGPPIVAIKSVQDYVNKEIVPSIARLGCEAAGLLLGIALDQHYSELTNIFGDNIGSLIEKGIKLQGIASLYRTNITEIFTTSTVDKYDIYDLLFTESIKVRVIDVDLNDYSITLQVRLPLLTRLLNTQIYKVDSISYNIQNREWYIPLPSHIMTKGAFLGGADVKECIEAFSSYICPSDPGFVLNHEMESCLSGNISQCPRTTVTSDIVPRYAFVNGGVVANCITTTCTCNGIGNRINQPPDQGVKIITHKECNTIGINGMLFNTNKEGTLAFYTPDDITLNNSVALNPIDISIELNKAKSDLEESKEWIRRSNQKLDSIEDKIEEILSKIYHIENEIARIKKLIGEAEPEA

SEQ ID NO: 144 - protein, 516 aa, Artificial Sequence
  PIV200920
MPISILLIITTMIMASHCQIDITKLQHVGVLVNSPKGMKIPQNFETRYLILSLIPKIEDSNSCGDQQIKQYKRLLDRLIIPLYDGLRLMKDVIVTNQESNENTDPRTERFFGGVIGTIALGVATSAQITAAVALVEAKQARSDIEKLKEAIRDTNKAVQSVQSSVGPPIVAIKSVQDYVNKEIVPSIARLGCEAAGLLLGIALTQHYSELTNIFGDNIGSLIEKGIKLQGIASLYRTNITEIFTTSTVDKYDIYDLLFTESIKVRVIDVDLNDYSITLQVRLPLLTRLLNTQIYKVDSISYNIQNREWYIPLPSHIMTKGAFLGGADVKECIEAPSSYICPSDPGFVLNHEMESCLSGNISQCPRTTVTSDIVPRYAFVNGGVVANCITTTCTCNGIGNRINQPPDQGVKIITHKECNTIGINGMLFNTNKEGTLAFYTPDDITLNNSVALNPIDISIELNKAKSDLEESKEWIRRSNQKLDSIEDKIEEILSKIYHIENEIARIKKLIGEAEPEA

SEQ ID NO: 145 - protein, 516 aa, Artificial Sequence
  PIV200921
MPISILLIITTMIMASHCQIDITKLQHVGVLVNSPKGMKIPQNFETRYLILSLIPKIEDSNSCGDQQIKQYKRLLDRLIIPLYDGLRLMKDVIVTNQESNENTDPRTERFFGGVIGTIALGVATSAQITAAVALVEAKQARSDIEKLKEAIRDTNKAVQSVQSSVGPPIVAIKSVQDYVNKEIVPCIARLGCEACGLLLGIALTQHYSELTNIFGDNIGSLIEKGIKLQGIASLYRTNITEIFTTSTVDKYDIYDLLFTESIKVRVIDVDLNDYSITLQVRLPLLTRLLNTQIYKVDSISYNIQNREWYIPLPSHIMTKGAFLGGADVKECIEAFSSYICPSDPGFVLNHEMESCLSGNISQCPRTTVTSDIVPRYAFVNGGVVANCITTTCTCNGIGNRINQPPDQGVKIITHKECNTIGINGMLFNTNKEGTLAFYTPDDITLNNSVALNPIDISIELNKAKSDLEESKEWIRRSNQKLDSIEDKIEEILSKIYHIENEIARIKKLIGEAEPEA

SEQ ID NO: 146 - protein, 516 aa, Artificial Sequence
  PIV200922
MPISILLIITTMIMASHCQIDITKLQHVGVLVNSPKGMKIPQNFETRYLILSLIPKIEDSNSCGDQQIKQYKRLLDRLIIPLYDGLRLMKDVIVTNQESNENTDPRTERFFGGVIGTIALGVATSAQITAAVALVEAKQARSDIEKLKEAIRDTNKAVQSVQSSVGPPIVAIKSVQDYVNKEIVPCIARLGCEACGLQLGIALTQHYSELTNIFGDNIGSLIEKGIKLQGIASLYRTNITEIFTTSTVDKYDIYDLLFTESIKVRVIDVDLNDYSITLQVRLPLLTRLLNTQIYKVDSISYNIQNREWYIPLPSHIMTKGAFLGGADVKECIEAPSSYICPSDPGFVLNHEMESCLSGNISQCPRTTVTSDIVPRYAFVNGGVVANCITTTCTCNGIGNRINQPPDQGVKIITHKECNTIGINGMLFNTNKEGTLAFYTPDDITLNNSVALNPIDISIELNKAKSDLEESKEWIRRSNQKLDSIEDKIEEILSKIYHIENEIARIKKLIGEAEPEA

SEQ ID NO: 147 - protein, 516 aa, Artificial Sequence
  PIV200923
MPISILLIITTMIMASHCQIDITKLQHVGVLVNSPKGMKIPQNFETRYLILSLIPKIEDSNSCGDQQIKQYKRLLDRLIIPLYDGLRLMKDVIVTNQESNENTDPRTERFFGGVIGTIALGVATSAQITAAVALVEAKQARSDIEKLKEAIRDTNKAVQSVQSSVGPPIVAIKSVQDYVNKEIVPSIARLGCEAAGLQLGIALDQHYSELTNIFGDNIGSLIEKGIKLQGIASLYRTNITEIFTTSTVDKYDIYDLLFTESIKVRVIDVDLNDYSITLQVRLPLLTRLLNTQIYKVDSISYNIQNREWYIPLPSHIMTKGAFLGGADVKECIEAPSSYICPSDPGFVLNHEMESCLSGNISQCPRTTVTSDIVPRYAFVNGGVVANCITTTCTCNGIGNRINQPPDQGVKIITHKECNTIGINGMLFNTNKEGTLAFYTPDDITLNNSVALNPIDISIELNKAKSDLEESKEWIRRSNQKLDSIEDKIEEILSKIYHIENEIARIKKLIGEAEPEA

SEQ ID NO: 148 - protein, 516 aa, Artificial Sequence
  PIV200924
MPISILLIITTMIMASHCQIDITKLQHVGVLVNSPKGMKIPQNFETRYLILSLIPKIEDSNSCGDQQIKQYKRLLDRLIIPLYDGLRLMKDVIVTNQESNENTDPRTERFFGGVIGTIALGVATSAQITAAVALVEAKQARSDIEKLKEAIRDTNKAVQSVQSSVGNPIVAIKSVQDYVNKEIVPSIARLGCEAAGLLLGIALDQHYSELTNIFGDNIGSLIEKGIKLQGIASLYRTNITEIFTTSTVDKYDIYDLLFTESIKVRVIDVDLNDYSITLQVRLPLLTRLLNTQIYKVDSISYNIQNREWYIPLPSHIMTKGAFLGGADVKECIEAPSSYICPSDPGFVLNHEMESCLSGNISQCPRTTVTSDIVPRYAFVNGGVVANCITTTCTCNGIGNRINQPPDQGVKIITHKECNTIGINGMLFNTNKEGTLAFYTPDDITLNNSVALNPIDISIELNKAKSDLEESKEWIRRSNQKLDSIEDKIEEILSKIYHIENEIARIKKLIGEAEPEA

SEQ ID NO: 149 - protein, 516 aa, Artificial Sequence
  PIV200925
MPISILLIITTMIMASHCQIDITKLQHVGVLVNSPKGMKIPQNFETRYLILSLIPKIEDSNSCGDQQIKQYKRLLDRLIIPLYDGLRLMKDVIVTNQESNENTDPRTERFFGGVIGTIALGVATSAQITAAVALVEAKQARSDIEKLKEAIRDTNKAVQSVQSSVGNPIVAIKSVQDYVNKEIVPCIARLGCEACGLLLGIALDQHYSELTNIFGDNIGSLIEKGIKLQGIASLYRTNITEIFTTSTVDKYDIYDLLFTESIKVRVIDVDLNDYSITLQVRLPLLTRLLNTQIYKVDSISYNIQNREWYIPLPSHIMTKGAFLGGADVKECIEAFSSYICPSDPGFVLNHEMESCLSGNISQCPRTTVTSDIVPRYAFVNGGVVANCITTTCTCNGIGNRINQPPDQGVKIITHKECNTIGINGMLFNTNKEGTLAFYTPDDITLNNSVALNPIDISIELNKAKSDLEESKEWIRRSNQKLDSIEDKIEEILSKIYHIENEIARIKKLIGEAEPEA

SEQ ID NO: 150 - protein, 516 aa, Artificial Sequence
  PIV200926
MPISILLIITTMIMASHCQIDITKLQHVGVLVNSPKGMKIPQNFETRYLILSLIPKIEDSNSCGDQQIKQYKRLLDRLIIPLYDGLRLMKDVIVTNQESNENTDPRTERFFGGVIGTIALGVATSAQITAAVALVEAKQARSDIEKLKEAIRDTNKAVQSVQSSVGNPIVAIKSVQDYVNKEIVPCIARLGCEACGLLLGIALTQHYSELTNIFGDNIGSLIEKGIKLQGIASLYRTNITEIFTTSTVDKYDIYDLLFTESIKVRVIDVDLNDYSITLQVRLPLLTRLLNTQIYKVDSISYNIQNREWYIPLPSHIMTKGAFLGGADVKECIEAPSSYICPSDPGFVLNHEMESCLSGNISQCPRTTVTSDIVPRYAFVNGGVVANCITTTCTCNGIGNRINQPPDQGVKIITHKECNTIGINGMLFNTNKEGTLAFYTPDDITLNNSVALNPIDISIELNKAKSDLEESKEWIRRSNQKLDSIEDKIEEILSKIYHIENEIARIKKLIGEAEPEA

SEQ ID NO: 151 - protein, 516 aa, Artificial Sequence
  PIV200927
MPISILLIITTMIMASHCQIDITKLQHVGVLVNSPKGMKIPQNFETRYLILSLIPKIEDSNSCGDQQIKQYKRLLDRLIIPLYDGLRLMKDVIVTNQESNENTDPRTERFFGGVIGTIALGVATSAQITAAVALVEAKQARSDIEKLKEAIRDTNKAVQSVQSSVGNPIVAIKSVQDYVNKEIVPCIARLGCEACGLQLGIALDQHYSELTNIFGDNIGSLIEKGIKLQGIASLYRTNITEIFTTSTVDKYDIYDLLFTESIKVRVIDVDLNDYSITLQVRLPLLTRLLNTQIYKVDSISYNIQNREWYIPLPSHIMTKGAFLGGADVKECIEAPSSYICPSDPGFVLNHEMESCLSGNISQCPRTTVTSDIVPRYAFVNGGVVANCITTTCTCNGIGNRINQPPDQGVKIITHKECNTIGINGMLFNTNKEGTLAFYTPDDITLNNSVALNPIDISIELNKAKSDLEESKEWIRRSNQKLDSIEDKIEEILSKIYHIENEIARIKKLIGEAEPEA

SEQ ID NO: 152 - protein, 516 aa, Artificial Sequence
  PIV200928
MPISILLIITTMIMASHCQIDITKLQHVGVLVNSPKGMKISQNFETRYLILSLIPKIEDSNSCGDQQIKQYKRLLDRLIIPLYDGLRLMKDVIVTNQESNENTDPRTERFFGGVIGTIALGVATSAQITAAVALVEAKQARSDIEKLKEAIRDTNKAVQSVQSSVGPPIVAIKSVQDYVNKEIVPSIARLGCEAAGLLLGIALDQHYSELTNIFGDNIGSLIEKGIKLQGIASLYRTNITEIFTTSTVDKYDIYDLLFTESIKVRVIDVDLNDYSITLQVRLPLLTRLLNTQIYKVDSISYNIQNREWYIPLPSHIMTKGAFLGGADVKECIEAPSSYICPSDPGFVLNHEMESCLSGNISQCPRTTVTSDIVPRYAFVNGGVVANCITTTCTCNGIGNRINQPPDQGVKIITHKECNTIGINGMLFNTNKEGTLAFYTPDDITLNNSVALNPIDISIELNKAKSDLEESKEWIRRSNQKLDSIEDKIEEILSKIYHIENEIARIKKLIGEAEPEA

SEQ ID NO: 153 - protein, 516 aa, Artificial Sequence
  PIV200929
MPISILLIITTMIMASHCQIDITKLQHVGVLVNSPKGMKISQNFETRYLILSLIPKIEDSNSCGDQQIKQYKRLLDRLIIPLYDGLRLMKDVIVTNQESNENTDPRTERFFGGVIGTIALGVATSAQITAAVALVEAKQARSDIEKLKEAIRDTNKAVQSVQSSVGPPIVAIKSVQDYVNKEIVPCIARLGCEACGLLLGIALDQHYSELTNIFGDNIGSLIEKGIKLQGIASLYRTNITEIFTTSTVDKYDIYDLLFTESIKVRVIDVDLNDYSITLQVRLPLLTRLLNTQIYKVDSISYNIQNREWYIPLPSHIMTKGAFLGGADVKECIEAFSSYICPSDPGFVLNHEMESCLSGNISQCPRTTVTSDIVPRYAFVNGGVVANCITTTCTCNGIGNRINQPPDQGVKIITHKECNTIGINGMLFNTNKEGTLAFYTPDDITLNNSVALNPIDISIELNKAKSDLEESKEWIRRSNQKLDSIEDKIEEILSKIYHIENEIARIKKLIGEAEPEA

SEQ ID NO: 154 - protein, 516 aa, Artificial Sequence
  PIV200930
MPISILLIITTMIMASHCQIDITKLQHVGVLVNSPKGMKISQNFETRYLILSLIPKIEDSNSCGDQQIKQYKRLLDRLIIPLYDGLRLMKDVIVTNQESNENTDPRTERFFGGVIGTIALGVATSAQITAAVALVEAKQARSDIEKLKEAIRDTNKAVQSVQSSVGPPIVAIKSVQDYVNKEIVPCIARLGCEACGLLLGIALTQHYSELTNIFGDNIGSLIEKGIKLQGIASLYRTNITEIFTTSTVDKYDIYDLLFTESIKVRVIDVDLNDYSITLQVRLPLLTRLLNTQIYKVDSISYNIQNREWYIPLPSHIMTKGAFLGGADVKECIEAPSSYICPSDPGFVLNHEMESCLSGNISQCPRTTVTSDIVPRYAFVNGGVVANCITTTCTCNGIGNRINQPPDQGVKIITHKECNTIGINGMLFNTNKEGTLAFYTPDDITLNNSVALNPIDISIELNKAKSDLEESKEWIRRSNQKLDSIEDKIEEILSKIYHIENEIARIKKLIGEAEPEA

SEQ ID NO: 155 - protein, 516 aa, Artificial Sequence
  PIV200931
MPISILLIITTMIMASHCQIDITKLQHVGVLVNSPKGMKISQNFETRYLILSLIPKIEDSNSCGDQQIKQYKRLLDRLIIPLYDGLRLMKDVIVTNQESNENTDPRTERFFGGVIGTIALGVATSAQITAAVALVEAKQARSDIEKLKEAIRDTNKAVQSVQSSVGPPIVAIKSVQDYVNKEIVPCIARLGCEACGLQLGIALDQHYSELTNIFGDNIGSLIEKGIKLQGIASLYRTNITEIFTTSTVDKYDIYDLLFTESIKVRVIDVDLNDYSITLQVRLPLLTRLLNTQIYKVDSISYNIQNREWYIPLPSHIMTKGAFLGGADVKECIEAPSSYICPSDPGFVLNHEMESCLSGNISQCPRTTVTSDIVPRYAFVNGGVVANCITTTCTCNGIGNRINQPPDQGVKIITHKECNTIGINGMLFNTNKEGTLAFYTPDDITLNNSVALNPIDISIELNKAKSDLEESKEWIRRSNQKLDSIEDKIEEILSKIYHIENEIARIKKLIGEAEPEA

SEQ ID NO: 156 - protein, 516 aa, Artificial Sequence
  PIV200932
MPISILLIITTMIMASHCQIDITKLQHVGVLVNSPKGMKISQNFETRYLILSLIPKIEDSNSCGDQQIKQYKRLLDRLIIPLYDGLRLMKDVIVTNQESNENTDPRTERFFGGVIGTIALGVATSAQITAAVALVEAKQARSDIEKLKEAIRDTNKAVQSVQSSVGNPIVAIKSVQDYVNKEIVPCIARLGCEACGLLLGIALDQHYSELTNIFGDNIGSLIEKGIKLQGIASLYRTNITEIFTTSTVDKYDIYDLLFTESIKVRVIDVDLNDYSITLQVRLPLLTRLLNTQIYKVDSISYNIQNREWYIPLPSHIMTKGAFLGGADVKECIEAPSSYICPSDPGFVLNHEMESCLSGNISQCPRTTVTSDIVPRYAFVNGGVVANCITTTCTCNGIGNRINQPPDQGVKIITHKECNTIGINGMLFNTNKEGTLAFYTPDDITLNNSVALNPIDISIELNKAKSDLEESKEWIRRSNQKLDSIEDKIEEILSKIYHIENEIARIKKLIGEAEPEA

SEQ ID NO: 157 - protein, 516 aa, Artificial Sequence
  PIV200933
MPISILLIITTMIMASHCQIDITKLQHVGVLVNSPKGMKIPQNFETRYLILSLIPKIEDSNSCGDQQIKQYKRLLDRLIIPLYDGLRLMKDVIVTNQESNENTDPRTERFFGGVIGTIALGVATSAQITAAVALVEAKQARSDIEKLKEAIRDTNKAVQSVQSSVGPPIVAIKSVQDYVNKEIVPCIARLGCEACGLQLGIALDQHYSELTNIFGDNIGSLIEKGIKLQGIASLYRTNITEIFTTSTVDKYDIYDLLFTESIKVRVIDVDLNDYSITLQVRLPLLTRLLNTQIYKVDSISYNIQNREWYIPLPSHIMTKGAFLGGADVKECIEAFSSYICPSDPGFVLNHEMESCLSGNISQCPRTTVTSDIVPRYAFVNGGVVANCITTTCTCNGIGNRINQPPDQGVKIITHKECNTIGINGMLFNTNKEGTLAFYTPDDITLNNSVALNPIDISIELNKAKSDLEESKEWIRRSNQKLDSIEDKIEEILSKIYHIENEIARIKKLIGEAEPEA

SEQ ID NO: 158 - protein, 516 aa, Artificial Sequence
  PIV200934
MPISILLIITTMIMASHCQIDITKLQHVGVLVNSPKGMKIPQNFETRYLILSLIPKIEDSNSCGDQQIKQYKRLLDRLIIPLYDGLRLMKDVIVTNQESNENTDPRTERFFGGVIGTIALGVATSAQITAAVALVEAKQARSDIEKLKEAIRDTNKAVQSVQSSVGPPIVAIKSVQDYVNKEIVPSIARLGCEAAGLLLGIALDQHYSELTNIFGDNIGSLIEKGIKLQGIASLYRTNITEIFTTSTVDKYDIYDLLFTESIKVRVIDVDLNDYSITLQVRLPLLTRLLNTQIYKVDSISYNIQNREWYIPLPSHIMTKGAFLGGADVKECIEAPSSYICPSDPGFVLNHEMESCLSGNISQCPRTTVTSDIVPRYAFVNGGVVANCITTTCTCNGIGNRINQPPDQGVKIITHKECNTIGINGMLFNTNKEGTLAFYTPDDITLNNSVALNPIDISIELNKAKSDLEESKEWIRRSNQKLDSIEDKIEEILSKIYHIENEIARIKKLIGEAEPEA

SEQ ID NO: 159 - protein, 516 aa, Artificial Sequence
  PIV200935
MPISILLIITTMIMASHCQIDITKLQHVGVLVNSPKGMKIPQNFETRYLILSLIPKIEDSNSCGDQQIKQYKRLLDRLIIPLYDGLRLMKDVIVTNQESNENTDPRTERFFGGVIGTIALGVATSAQITAAVALVEAKQARSDIEKLKEAIRDTNKAVQSVQSSVGPPIVAIKSVQDYVNKEIVPCIARLGCEACGLLLGIALDQHYSELTNIFGDNIGSLIEKGIKLQGIASLYRTNITEIFTTSTVDKYDIYDLLFTESIKVRVIDVDLNDYSITLQVRLPLLTRLLNTQIYKVDSISYNIQNREWYIPLPSHIMTKGAFLGGADVKECIEAFSSYICPSDPGFVLNHEMESCLSGNISQCPRTTVTSDIVPRYAFVNGGVVANCITTTCTCNGIGNRINQPPDQGVKIITHKECNTIGINGMLFNTNKEGTLAFYTPDDITLNNSVALNPIDISIELNKAKSDLEESKEWIRRSNQKLDSIEDKIEEILSKIYHIENEIARIKKLIGEAEPEA

SEQ ID NO: 160 - protein, 516 aa, Artificial Sequence
  PIV200936
MPISILLIITTMIMASHCQIDITKLQHVGVLVNSPKGMKIPQNFETRYLILSLIPKIEDSNSCGDQQIKQYKRLLDRLIIPLYDGLRLMKDVIVTNQESNENTDPRTERFFGGVIGTIALGVATSAQITAAVALVEAKQARSDIEKLKEAIRDTNKAVQSVQSSVGPPIVAIKSVQDYVNKEIVPCIARLGCEACGLLLGIALTQHYSELTNIFGDNIGSLIEKGIKLQGIASLYRTNITEIFTTSTVDKYDIYDLLFTESIKVRVIDVDLNDYSITLQVRLPLLTRLLNTQIYKVDSISYNIQNREWYIPLPSHIMTKGAFLGGADVKECIEAPSSYICPSDPGFVLNHEMESCLSGNISQCPRTTVTSDIVPRYAFVNGGVVANCITTTCTCNGIGNRINQPPDQGVKIITHKECNTIGINGMLFNTNKEGTLAFYTPDDITLNNSVALNPIDISIELNKAKSDLEESKEWIRRSNQKLDSIEDKIEEILSKIYHIENEIARIKKLIGEAEPEA

SEQ ID NO: 161 - protein, 516 aa, Artificial Sequence
  PIV200937
MPISILLIITTMIMASHCQIDITKLQHVGVLVNSPKGMKIPQNFETRYLILSLIPKIEDSNSCGDQQIKQYKRLLDRLIIPLYDGLRLMKDVIVTNQESNENTDPRTERFFGGVIGTIALGVATSAQITAAVALVEAKQARSDIEKLKEAIRDTNKAVQSVQSSVGPPIVAIKSVQDYVNKEIVPCIARLGCEACGLQLGIALDQHYSELTNIFGDNIGSLIEKGIKLQGIASLYRTNITEIFTTSTVDKYDIYDLLFTESIKVRVIDVDLNDYSITLQVRLPLLTRLLNTQIYKVDSISYNIQNREWYIPLPSHIMTKGAFLGGADVKECIEAPSSYICPSDPGFVLNHEMESCLSGNISQCPRTTVTSDIVPRYAFVNGGVVANCITTTCTCNGIGNRINQPPDQGVKIITHKECNTIGINGMLFNTNKEGTLAFYTPDDITLNNSVALNPIDISIELNKAKSDLEESKEWIRRSNQKLDSIEDKIEEILSKIYHIENEIARIKKLIGEAEPEA

SEQ ID NO: 162 - protein, 516 aa, Artificial Sequence
  PIV200938
MPISILLIITTMIMASHCQIDITKLQHVGVLVNSPKGMKIPQNFETRYLILSLIPKIEDSNSCGDQQIKQYKRLLDRLIIPLYDGLRLMKDVIVTNQESNENTDPRTERFFGGVIGTIALGVATSAQITAAVALVEAKQARSDIEKLKEAIRDTNKAVQSVQSSVGNPIVAIKSVQDYVNKEIVPCIARLGCEACGLLLGIALDQHYSELTNIFGDNIGSLIEKGIKLQGIASLYRTNITEIFTTSTVDKYDIYDLLFTESIKVRVIDVDLNDYSITLQVRLPLLTRLLNTQIYKVDSISYNIQNREWYIPLPSHIMTKGAFLGGADVKECIEAPSSYICPSDPGFVLNHEMESCLSGNISQCPRTTVTSDIVPRYAFVNGGVVANCITTTCTCNGIGNRINQPPDQGVKIITHKECNTIGINGMLFNTNKEGTLAFYTPDDITLNNSVALNPIDISIELNKAKSDLEESKEWIRRSNQKLDSIEDKIEEILSKIYHIENEIARIKKLIGEAEPEA

SEQ ID NO: 163 - protein, 516 aa, Artificial Sequence
  PIV200939
MPISILLIITTMIMASHCQIDITKLQHVGVLVNSPKGMKISQNFETRYLILSLIPKIEDSNSCGDQQIKQYKRLLDRLIIPLYDGLRLMKDVIVTNQESNENTDPRTERFFGGVIGTIALGVATSAQITAAVALVEAKQARSDIEKLKEAIRDTNKAVQSVQSSVGPPIVAIKSVQDYVNKEIVPCIARLGCEACGLLLGIALDQHYSELTNIFGDNIGSLIEKGIKLQGIASLYRTNITEIFTTSTVDKYDIYDLLFTESIKVRVIDVDLNDYSITLQVRLPLLTRLLNTQIYKVDSISYNIQNREWYIPLPSHIMTKGAFLGGADVKECIEAPSSYICPSDPGFVLNHEMESCLSGNISQCPRTTVTSDIVPRYAFVNGGVVANCITTTCTCNGIGNRINQPPDQGVKIITHKECNTIGINGMLFNTNKEGTLAFYTPDDITLNNSVALNPIDISIELNKAKSDLEESKEWIRRSNQKLDSIEDKIEEILSKIYHIENEIARIKKLIGEAEPEA

SEQ ID NO: 164 - protein, 516 aa, Artificial Sequence
  PIV200940
MPISILLIITTMIMASHCQIDITKLQHVGVLVNSPKGMKIPQNFETRYLILSLIPKIEDSNSCGDQQIKQYKRLLDRLIIPLYDGLRLMKDVIVTNQESNENTDPRTERFFGGVIGTIALGVATSAQITAAVALVEAKQARSDIEKLKEAIRDTNKAVQSVQSSVGPPIVAIKSVQDYVNKEIVPCIARLGCEACGLLLGIALDQHYSELTNIFGDNIGSLIEKGIKLQGIASLYRTNITEIFTTSTVDKYDIYDLLFTESIKVRVIDVDLNDYSITLQVRLPLLTRLLNTQIYKVDSISYNIQNREWYIPLPSHIMTKGAFLGGADVKECIEAPSSYICPSDPGFVLNHEMESCLSGNISQCPRTTVTSDIVPRYAFVNGGVVANCITTTCTCNGIGNRINQPPDQGVKIITHKECNTIGINGMLFNTNKEGTLAFYTPDDITLNNSVALNPIDISIELNKAKSDLEESKEWIRRSNQKLDSIEDKIEEILSKIYHIENEIARIKKLIGEAEPEA

SEQ ID NO: 165 - protein, 491 aa, Artificial Sequence
  PIV200941
MPISILLIITTMIMASHCQIDITKLQHVGVLVNSPKGMKISQNFETRYLILSLIPKIEDSNSCGDQQIKQYKRLLDRLIIPLYDGLRLMKDVIVTNQESNENTDPRTERFFGGVIGTIALGVATSAQITAAVALVEAKQARSDIEKLKEAIRDTNKAVQSVQSSVGNPIVAIKSVQDYVNKEIVPSIARLGCEAAGLQLGIALTQHYSELTNIFGDNIGSLIEKGIKLQGIASLYRTNITEIFTTSTVDKYDIYDLLFTESIKVRVIDVDLNDYSITLQVRLPLLTRLLNTQIYKVDSISYNIQNREWYIPLPSHIMTKGAFLGGADVKECIEAFSSYICPSDPGFVLNHEMESCLSGNISQCPRTTVTSDIVPRYAFVNGGVVANCITTTCTCNGIGNRINQPPDQGVKIITHKECNTIGINGMLFNTNKEGTLAFYTPDDITLNNSVALNPIDISIELNKAKSDLEESKEWIRRSNQKLDSIGSGEPEA

SEQ ID NO: 166 - protein, 491 aa, Artificial Sequence
  PIV200943
MPISILLIITTMIMASHCQIDITKLQHVGVLVNSPKGMKISQNFETRYLILSLIPKIEDSNSCGDQQIKQYKRLLDRLIIPLYDGLRLMKDVIVTNQESNENTDPRTERFFGGVIGTIALGVATSAQITAAVALVEAKQARSDIEKLKEAIRDTNKAVQSVQSSVGNPIVAIKSVQDYVNKEIVPSIARLGCEAAGLQLGIALTQHYSELTNIFGDNIGSLIEKGIKLQGIASLYRTNITEIFTTSTVDKYDIYDLLFTESIKVRVIDVDLNDYSITLQVRLPLLTRLLNTQIYKVDSISYNIQNREWYIPLPSHIMTKGAFLGGADVKECIEAFSSYICPSDPGFVLNHEMESCLSGNISQCPRTTVTSDIVPRYAFVNGGVVANCITTTCTCNGIGNRINQPPDQGVKIITHKECNTIGINGMLFNTNKEGTLAFYTPDDITLNNSVALNPIDISIELNKAKSDLEEVKEWIRRSNQKLDSIGSGEPEA

SEQ ID NO: 167 - protein, 491 aa, Artificial Sequence
  PIV200945
MPISILLIITTMIMASHCQIDITKLQHVGVLVNSPKGMKISQNFETRYLILSLIPKIEDSNSCGDQQIKQYKRLLDRLIIPLYDGLRLMKDVIVTNQESNENTDPRTERFFGGVIGTIALGVATSAQITAAVALVEAKQARSDIEKLKEAIRDTNKAVQSVQSSVGNPIVAIKSVQDYVNKEIVPSIARLGCEAAGLQLGIALTQHYSELTNIFGDNIGSLIEKGIKLQGIASLYRTNITEIFTTSTVDKYDIYDLLFTESIKVRVIDVDLNDYSITLQVRLPLLTRLLNTQIYKVDSISYNIQNREWYIPLPSHIMTKGAFLGGADVKECIEAFSSYICPSDPGFVLNHEMESCLSGNISQCPRTTVTSDIVPRYAFVNGGVVANCITTTCTCNGIGNRINQPPDQGVKIITHKECNTIGINGMLFNTNKEGTLAFYTPDDITLNNSVALNPIDISIELNKAKSDLEESKEWIRRVNQKLDSIGSGEPEA

SEQ ID NO: 168 - protein, 491 aa, Artificial Sequence
  PIV200947
MPISILLIITTMIMASHCQIDITKLQHVGVLVNSPKGMKISQNFETRYLILSLIPKIEDSNSCGDQQIKQYKRLLDRLIIPLYDGLRLMKDVIVTNQESNENTDPRTERFFGGVIGTIALGVATSAQITAAVALVEAKQARSDIEKLKEAIRDTNKAVQSVQSSVGNPIVAIKSVQDYVNKEIVPSIARLGCEAAGLQLGIALTQHYSELTNIFGDNIGSLIEKGIKLQGIASLYRTNITEIFTTSTVDKYDIYDLLFTESIKVRVIDVDLNDYSITLQVRLPLLTRLLNTQIYKVDSISYNIQNREWYIPLPSHIMTKGAFLGGADVKECIEAFSSYICPSDPGFVLNHEMESCLSGNISQCPRTTVTSDIVPRYAFVNGGVVANCITTTCTCNGIGNRINQPPDQGVKIITHKECNTIGINGMLFNTNKEGTLAFYTPDDITLNNSVALNPIDISIELNKVKSDLEEVKEWIRRSNQKLDSIGSGEPEA

SEQ ID NO: 169 - protein, 491 aa, Artificial Sequence
  PIV200949
MPISILLIITTMIMASHCQIDITKLQHVGVLVNSPKGMKISQNFETRYLILSLIPKIEDSNSCGDQQIKQYKRLLDRLIIPLYDGLRLMKDVIVTNQESNENTDPRTERFFGGVIGTIALGVATSAQITAAVALVEAKQARSDIEKLKEAIRDTNKAVQSVQSSVGNPIVAIKSVQDYVNKEIVPSIARLGCEAAGLQLGIALTQHYSELTNIFGDNIGSLIEKGIKLQGIASLYRTNITEIFTTSTVDKYDIYDLLFTESIKVRVIDVDLNDYSITLQVRLPLLTRLLNTQIYKVDSISYNIQNREWYIPLPSHIMTKGAFLGGADVKECIEAFSSYICPSDPGFVLNHEMESCLSGNISQCPRTTVTSDIVPRYAFVNGGVVANCITTTCTCNGIGNRINQPPDQGVKIITHKECNTIGINGMLFNTNKEGTLAFYTPDDITLNNSVALNPIDISIELNKVKSDLEESKEWIRRVNQKLDSIGSGEPEA

SEQ ID NO: 170 - protein, 491 aa, Artificial Sequence
  PIV200950
MPISILLIITTMIMASHCQIDITKLQHVGVLVNSPKGMKISQNFETRYLILSLIPKIEDSNSCGDQQIKQYKRLLDRLIIPLYDGLRLMKDVIVTNQESNENTDPRTERFFGGVIGTIALGVATSAQITAAVALVEAKQARSDIEKLKEAIRDTNKAVQSVQSSVGNPIVAIKSVQDYVNKEIVPSIARLGCEAAGLQLGIALTQHYSELTNIFGDNIGSLIEKGIKLQGIASLYRTNITEIFTTSTVDKYDIYDLLFTESIKVRVIDVDLNDYSITLQVRLPLLTRLLNTQIYKVDSISYNIQNREWYIPLPSHIMTKGAFLGGADVKECIEAFSSYICPSDPGFVLNHEMESCLSGNISQCPRTTVTSDIVPRYAFVNGGVVANCITTTCTCNGIGNRINQPPDQGVKIITHKECNTIGINGMLFNTNKEGTLAFYTPDDITLNNSVALNPIDISIELNKAKSDLEEVKEWLRRSNQKLDSIGSGEPEA

SEQ ID NO: 171 - protein, 491 aa, Artificial Sequence
  PIV200951
MPISILLIITTMIMASHCQIDITKLQHVGVLVNSPKGMKISQNFETRYLILSLIPKIEDSNSCGDQQIKQYKRLLDRLIIPLYDGLRLMKDVIVTNQESNENTDPRTERFFGGVIGTIALGVATSAQITAAVALVEAKQARSDIEKLKEAIRDTNKAVQSVQSSVGNPIVAIKSVQDYVNKEIVPSIARLGCEAAGLQLGIALTQHYSELTNIFGDNIGSLIEKGIKLQGIASLYRTNITEIFTTSTVDKYDIYDLLFTESIKVRVIDVDLNDYSITLQVRLPLLTRLLNTQIYKVDSISYNIQNREWYIPLPSHIMTKGAFLGGADVKECIEAFSSYICPSDPGFVLNHEMESCLSGNISQCPRTTVTSDIVPRYAFVNGGVVANCITTTCTCNGIGNRINQPPDQGVKIITHKECNTIGINGMLFNTNKEGTLAFYTPDDITLNNSVALNPIDISIELNKAKSDLEEVKEWIRRVNQKLDSIGSGEPEA

SEQ ID NO: 172 - protein, 491 aa, Artificial Sequence
  PIV200952
MPISILLIITTMIMASHCQIDITKLQHVGVLVNSPKGMKISQNFETRYLILSLIPKIEDSNSCGDQQIKQYKRLLDRLIIPLYDGLRLMKDVIVTNQESNENTDPRTERFFGGVIGTIALGVATSAQITAAVALVEAKQARSDIEKLKEAIRDTNKAVQSVQSSVGNPIVAIKSVQDYVNKEIVPSIARLGCEAAGLQLGIALTQHYSELTNIFGDNIGSLIEKGIKLQGIASLYRTNITEIFTTSTVDKYDIYDLLFTESIKVRVIDVDLNDYSITLQVRLPLLTRLLNTQIYKVDSISYNIQNREWYIPLPSHIMTKGAFLGGADVKECIEAFSSYICPSDPGFVLNHEMESCLSGNISQCPRTTVTSDIVPRYAFVNGGVVANCITTTCTCNGIGNRINQPPDQGVKIITHKECNTIGINGMLFNTNKEGTLAFYTPDDITLNNSVALNPIDISIELNKAKSDLEESKEWLRRVNQKLDSIGSGEPEA

SEQ ID NO: 173 - protein, 491 aa, Artificial Sequence
  PIV200953
MPISILLIITTMIMASHCQIDITKLQHVGVLVNSPKGMKISQNFETRYLILSLIPKIEDSNSCGDQQIKQYKRLLDRLIIPLYDGLRLMKDVIVTNQESNENTDPRTERFFGGVIGTIALGVATSAQITAAVALVEAKQARSDIEKLKEAIRDTNKAVQSVQSSVGNPIVAIKSVQDYVNKEIVPSIARLGCEAAGLQLGIALTQHYSELTNIFGDNIGSLIEKGIKLQGIASLYRTNITEIFTTSTVDKYDIYDLLFTESIKVRVIDVDLNDYSITLQVRLPLLTRLLNTQIYKVDSISYNIQNREWYIPLPSHIMTKGAFLGGADVKECIEAFSSYICPSDPGFVLNHEMESCLSGNISQCPRTTVTSDIVPRYAFVNGGVVANCITTTCTCNGIGNRINQPPDQGVKIITHKECNTIGINGMLFNTNKEGTLAFYTPDDITLNNSVALNPIDISIELNKVKSDLEEVKEWLRRSNQKLDSIGSGEPEA

SEQ ID NO: 174 - protein, 491 aa, Artificial Sequence
  PIV200954
MPISILLIITTMIMASHCQIDITKLQHVGVLVNSPKGMKISQNFETRYLILSLIPKIEDSNSCGDQQIKQYKRLLDRLIIPLYDGLRLMKDVIVTNQESNENTDPRTERFFGGVIGTIALGVATSAQITAAVALVEAKQARSDIEKLKEAIRDTNKAVQSVQSSVGNPIVAIKSVQDYVNKEIVPSIARLGCEAAGLQLGIALTQHYSELTNIFGDNIGSLIEKGIKLQGIASLYRTNITEIFTTSTVDKYDIYDLLFTESIKVRVIDVDLNDYSITLQVRLPLLTRLLNTQIYKVDSISYNIQNREWYIPLPSHIMTKGAFLGGADVKECIEAFSSYICPSDPGFVLNHEMESCLSGNISQCPRTTVTSDIVPRYAFVNGGVVANCITTTCTCNGIGNRINQPPDQGVKIITHKECNTIGINGMLFNTNKEGTLAFYTPDDITLNNSVALNPIDISIELNKVKSDLEEVKEWIRRVNQKLDSIGSGEPEA

SEQ ID NO: 175 - protein, 491 aa, Artificial Sequence
  PIV200955
MPISILLIITTMIMASHCQIDITKLQHVGVLVNSPKGMKISQNFETRYLILSLIPKIEDSNSCGDQQIKQYKRLLDRLIIPLYDGLRLMKDVIVTNQESNENTDPRTERFFGGVIGTIALGVATSAQITAAVALVEAKQARSDIEKLKEAIRDTNKAVQSVQSSVGNPIVAIKSVQDYVNKEIVPSIARLGCEAAGLQLGIALTQHYSELTNIFGDNIGSLIEKGIKLQGIASLYRTNITEIFTTSTVDKYDIYDLLFTESIKVRVIDVDLNDYSITLQVRLPLLTRLLNTQIYKVDSISYNIQNREWYIPLPSHIMTKGAFLGGADVKECIEAFSSYICPSDPGFVLNHEMESCLSGNISQCPRTTVTSDIVPRYAFVNGGVVANCITTTCTCNGIGNRINQPPDQGVKIITHKECNTIGINGMLFNTNKEGTLAFYTPDDITLNNSVALNPIDISIELNKVKSDLEESKEWLRRVNQKLDSIGSGEPEA

SEQ ID NO: 176 - protein, 491 aa, Artificial Sequence
  PIV200956
MPISILLIITTMIMASHCQIDITKLQHVGVLVNSPKGMKISQNFETRYLILSLIPKIEDSNSCGDQQIKQYKRLLDRLIIPLYDGLRLMKDVIVTNQESNENTDPRTERFFGGVIGTIALGVATSAQITAAVALVEAKQARSDIEKLKEAIRDTNKAVQSVQSSVGNPIVAIKSVQDYVNKEIVPSIARLGCEAAGLQLGIALTQHYSELTNIFGDNIGSLIEKGIKLQGIASLYRTNITEIFTTSTVDKYDIYDLLFTESIKVRVIDVDLNDYSITLQVRLPLLTRLLNTQIYKVDSISYNIQNREWYIPLPSHIMTKGAFLGGADVKECIEAFSSYICPSDPGFVLNHEMESCLSGNISQCPRTTVTSDIVPRYAFVNGGVVANCITTTCTCNGIGNRINQPPDQGVKIITHKECNTIGINGMLFNTNKEGTLAFYTPDDITLNNSVALNPIDISIELNKAKSDLEEVKEWLRRVNQKLDSIGSGEPEA

SEQ ID NO: 177 - protein, 491 aa, Artificial Sequence
  PIV200957
MPISILLIITTMIMASHCQIDITKLQHVGVLVNSPKGMKISQNFETRYLILSLIPKIEDSNSCGDQQIKQYKRLLDRLIIPLYDGLRLMKDVIVTNQESNENTDPRTERFFGGVIGTIALGVATSAQITAAVALVEAKQARSDIEKLKEAIRDTNKAVQSVQSSVGNPIVAIKSVQDYVNKEIVPSIARLGCEAAGLQLGIALTQHYSELTNIFGDNIGSLIEKGIKLQGIASLYRTNITEIFTTSTVDKYDIYDLLFTESIKVRVIDVDLNDYSITLQVRLPLLTRLLNTQIYKVDSISYNIQNREWYIPLPSHIMTKGAFLGGADVKECIEAFSSYICPSDPGFVLNHEMESCLSGNISQCPRTTVTSDIVPRYAFVNGGVVANCITTTCTCNGIGNRINQPPDQGVKIITHKECNTIGINGMLFNTNKEGTLAFYTPDDITLNNSVALNPIDISIELNKVKSDLEEVKEWLRRVNQKLDSIGSGEPEA

SEQ ID NO: 178 - protein, 491 aa, Artificial Sequence
  PIV200958
MPISILLIITTMIMASHCQIDITKLQHVGVLVNSPKGMKISQNFETRYLILSLIPKIEDSNSCGDQQIKQYKRLLDRLIIPLYDGLRLMKDVIVTNQESNENTDPRTERFFGGVIGTIALGVATSAQITAAVALVEAKQARSDIEKLKEAIRDTNKAVQSVQSSVGNPIVAIKSVQDYVNKEIVPSIARLGCEAAGLQLGIALTQHYSELTNIFGDNIGSLIEKGIKLQGIASLYRTNITEIFTTSTVDKYDIYDLLFTESIKVRVIDVDLNDYSITLQVRLPLLTRLLNTQIYKVDSISYNIQNREWYIPLPSHIMTKGAFLGGADVKECIEAFSSYICPSDPGFVLNHEMESCLSGNISQCPRTTVTSDIVPRYAFVNGGVVANCITTTCTCNGIGNRINQPPDQGVKIITHKECNTIGINGMLFNTNKEGTLAFYTPDDITLNNSVALNPIDISIELNKVKSDFEEVKEWLRRVNQKLDSIGSGEPEA

SEQ ID NO: 179 - protein, 491 aa, Artificial Sequence
  PIV200960
MPISILLIITTMIMASHCQIDITKLQHVGVLVNSPKGMKISQNFETRYLILSLIPKIEDSNSCGDQQIKQYKRLLDRLIIPLYDGLRLQKDVIVTNQESNENTDPRTERFFGGVIGTIALGVATSAQITAAVALVEAKQARSDIEKLKEAIRDTNKAVQSVQSSVGNLIVAIKSVQDYVNKEIVPSIARLGCEAAGLQLGIALTQHYSELTNIFGDNIGSLQEKGIKLQGIASLYRTNITEIFTTSTVDKYDIYDLLFTESIKVRVIDVDLNDYSITLQVRLPLLTRLLNTQIYKVDSISYNIQNREWYIPLPSHIMTKGAFLGGADVKECIEAFSSYICPSDPGFVLNHEMESCLSGNISQCPRTTVTSDIVPRYAFVNGGVVANCITTTCTCNGIGNRINQPPDQGVKIITHKECNTIGINGMLFNTNKEGTLAFYTPDDITLNNSVALDPIDISIELNKAKSDLEEVKEWIRRSNQKLDSIGGSEPEA

SEQ ID NO: 180 - protein, 491 aa, Artificial Sequence
  PIV200962
MPISILLIITTMIMASHCQIDITKLQHVGVLVNSPKGMKISQNFETRYLILSLIPKIEDSNSCGDQQIKQYKRLLDRLIIPLYDGLRLQKDVIVTNQESNENTDPRTERFFGGVIGTIALGVATSAQITAAVALVEAKQARSDIEKLKEAIRDTNKAVQSVQSSVGNLIVAIKSVQDYVNKEIVPSIARLGCEAAGLQLGIALTQHYSELTNIFGDNIGSLQEKGIKLQGIASLYRTNITEIFTTSTVDKYDIYDLLFTESIKVRVIDVDLNDYSITLQVRLPLLTRLLNTQIYKVDSISYNIQNREWYIPLPSHIMTKGAFLGGADVKECIEAFSSYICPSDPGFVLNHEMESCLSGNISQCPRTTVTSDIVPRYAFVNGGVVANCITTTCTCNGIGNRINQPPDQGVKIITHKECNTIGINGMLFNTNKEGTLAFYTPDDITLNNSVALDPIDISIELNKAKSDLEESKEWIRRVNQKLDSIGGSEPEA

SEQ ID NO: 181 - protein, 491 aa, Artificial Sequence
  PIV200964
MPISILLIITTMIMASHCQIDITKLQHVGVLVNSPKGMKISQNFETRYLILSLIPKIEDSNSCGDQQIKQYKRLLDRLIIPLYDGLRLQKDVIVTNQESNENTDPRTERFFGGVIGTIALGVATSAQITAAVALVEAKQARSDIEKLKEAIRDTNKAVQSVQSSVGNLIVAIKSVQDYVNKEIVPSIARLGCEAAGLQLGIALTQHYSELTNIFGDNIGSLQEKGIKLQGIASLYRTNITEIFTTSTVDKYDIYDLLFTESIKVRVIDVDLNDYSITLQVRLPLLTRLLNTQIYKVDSISYNIQNREWYIPLPSHIMTKGAFLGGADVKECIEAFSSYICPSDPGFVLNHEMESCLSGNISQCPRTTVTSDIVPRYAFVNGGVVANCITTTCTCNGIGNRINQPPDQGVKIITHKECNTIGINGMLFNTNKEGTLAFYTPDDITLNNSVALDPIDISIELNKVKSDLEEVKEWLRRVNQKLDSIGGSEPEA

SEQ ID NO: 182 - protein, 491 aa, Artificial Sequence
  PIV200965
MPISILLIITTMIMASHCQIDITKLQHVGVLVNSPKGMKISQNFETRYLILSLIPKIEDSNSCGDQQIKQYKRLLDRLIIPLYDGLRLQKDVIVTNQESNENTDPRTERFFGGVIGTIALGVATSAQITAAVALVEAKQARSDIEKLKEAIRDTNKAVQSVQSSVGNLIVAIKSVQDYVNKEIVPSIARLGCEAAGLQLGIALTQHYSELTNIFGDNIGSLQEKGIKLQGIASLYRTNITEIFTTSTVDKYDIYDLLFTESIKVRVIDVDLNDYSITLQVRLPLLTRLLNTQIYKVDSISYNIQNREWYIPLPSHIMTKGAFLGGADVKECIEAFSSYICPSDPGFVLNHEMESCLSGNISQCPRTTVTSDIVPRYAFVNGGVVANCITTTCTCNGIGNRINQPPDQGVKIITHKECNTIGINGMLFNTNKEGTLAFYTPDDITLNNSVALDPIDISIELNKVKSDFEEVKEWLRRVNQKLDSIGGSEPEA

SEQ ID NO: 183 - protein, 491 aa, Artificial Sequence
  PIV200967
MPISILLIITTMIMASHCQIDITKLQHVGVLVNSPKGMKISQNFETRYLILSLIPKIEDSNSCGDQQIKQYKRLLDRLIIPLYDGLRLQKDVIVTNQESNENTDPRTERFFGGVIGTIALGVATSAQITAAVALVEAKQARSDIEKLKEAIRDTNKAVQSVQSSPGNLIVAIKSVQDYVNKEIVPCIARLGCEACGLQLGIALTQHYSELTNIFGDNIGSLQEKGIKLQGIASLYRTNITEIFTTSTVDKYDIYDLLFTESIKVRVIDVDLNDYSITLQVRLPLLTRLLNTQIYKVDSISYNIQNREWYIPLPSHIMTKGAFLGGADVKECIEAFSSYICPSDPGFVLNHEMESCLSGNISQCPRTTVTSDIVPRYAFVNGGVVANCITTTCTCNGIGNRINQPPDQGVKIITHKECNTIGINGMLFNTNKEGTLAFYTPDDITLNNSVALNPIDISIELNKAKSDLEEVKEWIRRSNQKLDSIGSGEPEA

SEQ ID NO: 184 - protein, 491 aa, Artificial Sequence
  PIV200969
MPISILLIITTMIMASHCQIDITKLQHVGVLVNSPKGMKISQNFETRYLILSLIPKIEDSNSCGDQQIKQYKRLLDRLIIPLYDGLRLQKDVIVTNQESNENTDPRTERFFGGVIGTIALGVATSAQITAAVALVEAKQARSDIEKLKEAIRDTNKAVQSVQSSPGNLIVAIKSVQDYVNKEIVPCIARLGCEACGLQLGIALTQHYSELTNIFGDNIGSLQEKGIKLQGIASLYRTNITEIFTTSTVDKYDIYDLLFTESIKVRVIDVDLNDYSITLQVRLPLLTRLLNTQIYKVDSISYNIQNREWYIPLPSHIMTKGAFLGGADVKECIEAFSSYICPSDPGFVLNHEMESCLSGNISQCPRTTVTSDIVPRYAFVNGGVVANCITTTCTCNGIGNRINQPPDQGVKIITHKECNTIGINGMLFNTNKEGTLAFYTPDDITLNNSVALNPIDISIELNKAKSDLEESKEWIRRVNQKLDSIGSGEPEA

SEQ ID NO: 185 - protein, 491 aa, Artificial Sequence
  PIV200971
MPISILLIITTMIMASHCQIDITKLQHVGVLVNSPKGMKISQNFETRYLILSLIPKIEDSNSCGDQQIKQYKRLLDRLIIPLYDGLRLQKDVIVTNQESNENTDPRTERFFGGVIGTIALGVATSAQITAAVALVEAKQARSDIEKLKEAIRDTNKAVQSVQSSPGNLIVAIKSVQDYVNKEIVPCIARLGCEACGLQLGIALTQHYSELTNIFGDNIGSLQEKGIKLQGIASLYRTNITEIFTTSTVDKYDIYDLLFTESIKVRVIDVDLNDYSITLQVRLPLLTRLLNTQIYKVDSISYNIQNREWYIPLPSHIMTKGAFLGGADVKECIEAFSSYICPSDPGFVLNHEMESCLSGNISQCPRTTVTSDIVPRYAFVNGGVVANCITTTCTCNGIGNRINQPPDQGVKIITHKECNTIGINGMLFNTNKEGTLAFYTPDDITLNNSVALNPIDISIELNKVKSDLEEVKEWIRRSNQKLDSIGSGEPEA

SEQ ID NO: 186 - protein, 491 aa, Artificial Sequence
  PIV200973
MPISILLIITTMIMASHCQIDITKLQHVGVLVNSPKGMKISQNFETRYLILSLIPKIEDSNSCGDQQIKQYKRLLDRLIIPLYDGLRLQKDVIVTNQESNENTDPRTERFFGGVIGTIALGVATSAQITAAVALVEAKQARSDIEKLKEAIRDTNKAVQSVQSSPGNLIVAIKSVQDYVNKEIVPCIARLGCEACGLQLGIALTQHYSELTNIFGDNIGSLQEKGIKLQGIASLYRTNITEIFTTSTVDKYDIYDLLFTESIKVRVIDVDLNDYSITLQVRLPLLTRLLNTQIYKVDSISYNIQNREWYIPLPSHIMTKGAFLGGADVKECIEAFSSYICPSDPGFVLNHEMESCLSGNISQCPRTTVTSDIVPRYAFVNGGVVANCITTTCTCNGIGNRINQPPDQGVKIITHKECNTIGINGMLFNTNKEGTLAFYTPDDITLNNSVALNPIDISIELNKVKSDLEESKEWIRRVNQKLDSIGSGEPEA

SEQ ID NO: 187 - protein, 491 aa, Artificial Sequence
  PIV200974
MPISILLIITTMIMASHCQIDITKLQHVGVLVNSPKGMKISQNFETRYLILSLIPKIEDSNSCGDQQIKQYKRLLDRLIIPLYDGLRLQKDVIVTNQESNENTDPRTERFFGGVIGTIALGVATSAQITAAVALVEAKQARSDIEKLKEAIRDTNKAVQSVQSSPGNLIVAIKSVQDYVNKEIVPCIARLGCEACGLQLGIALTQHYSELTNIFGDNIGSLQEKGIKLQGIASLYRTNITEIFTTSTVDKYDIYDLLFTESIKVRVIDVDLNDYSITLQVRLPLLTRLLNTQIYKVDSISYNIQNREWYIPLPSHIMTKGAFLGGADVKECIEAFSSYICPSDPGFVLNHEMESCLSGNISQCPRTTVTSDIVPRYAFVNGGVVANCITTTCTCNGIGNRINQPPDQGVKIITHKECNTIGINGMLFNTNKEGTLAFYTPDDITLNNSVALNPIDISIELNKAKSDLEEVKEWLRRSNQKLDSIGSGEPEA

SEQ ID NO: 188 - protein, 491 aa, Artificial Sequence
  PIV200975
MPISILLIITTMIMASHCQIDITKLQHVGVLVNSPKGMKISQNFETRYLILSLIPKIEDSNSCGDQQIKQYKRLLDRLIIPLYDGLRLQKDVIVTNQESNENTDPRTERFFGGVIGTIALGVATSAQITAAVALVEAKQARSDIEKLKEAIRDTNKAVQSVQSSPGNLIVAIKSVQDYVNKEIVPCIARLGCEACGLQLGIALTQHYSELTNIFGDNIGSLQEKGIKLQGIASLYRTNITEIFTTSTVDKYDIYDLLFTESIKVRVIDVDLNDYSITLQVRLPLLTRLLNTQIYKVDSISYNIQNREWYIPLPSHIMTKGAFLGGADVKECIEAFSSYICPSDPGFVLNHEMESCLSGNISQCPRTTVTSDIVPRYAFVNGGVVANCITTTCTCNGIGNRINQPPDQGVKIITHKECNTIGINGMLFNTNKEGTLAFYTPDDITLNNSVALNPIDISIELNKAKSDLEEVKEWIRRVNQKLDSIGSGEPEA

SEQ ID NO: 189 - protein, 491 aa, Artificial Sequence
  PIV200976
MPISILLIITTMIMASHCQIDITKLQHVGVLVNSPKGMKISQNFETRYLILSLIPKIEDSNSCGDQQIKQYKRLLDRLIIPLYDGLRLQKDVIVTNQESNENTDPRTERFFGGVIGTIALGVATSAQITAAVALVEAKQARSDIEKLKEAIRDTNKAVQSVQSSPGNLIVAIKSVQDYVNKEIVPCIARLGCEACGLQLGIALTQHYSELTNIFGDNIGSLQEKGIKLQGIASLYRTNITEIFTTSTVDKYDIYDLLFTESIKVRVIDVDLNDYSITLQVRLPLLTRLLNTQIYKVDSISYNIQNREWYIPLPSHIMTKGAFLGGADVKECIEAFSSYICPSDPGFVLNHEMESCLSGNISQCPRTTVTSDIVPRYAFVNGGVVANCITTTCTCNGIGNRINQPPDQGVKIITHKECNTIGINGMLFNTNKEGTLAFYTPDDITLNNSVALNPIDISIELNKAKSDLEESKEWLRRVNQKLDSIGSGEPEA

SEQ ID NO: 190 - protein, 491 aa, Artificial Sequence
  PIV200977
MPISILLIITTMIMASHCQIDITKLQHVGVLVNSPKGMKISQNFETRYLILSLIPKIEDSNSCGDQQIKQYKRLLDRLIIPLYDGLRLQKDVIVTNQESNENTDPRTERFFGGVIGTIALGVATSAQITAAVALVEAKQARSDIEKLKEAIRDTNKAVQSVQSSPGNLIVAIKSVQDYVNKEIVPCIARLGCEACGLQLGIALTQHYSELTNIFGDNIGSLQEKGIKLQGIASLYRTNITEIFTTSTVDKYDIYDLLFTESIKVRVIDVDLNDYSITLQVRLPLLTRLLNTQIYKVDSISYNIQNREWYIPLPSHIMTKGAFLGGADVKECIEAFSSYICPSDPGFVLNHEMESCLSGNISQCPRTTVTSDIVPRYAFVNGGVVANCITTTCTCNGIGNRINQPPDQGVKIITHKECNTIGINGMLFNTNKEGTLAFYTPDDITLNNSVALNPIDISIELNKVKSDLEEVKEWLRRSNQKLDSIGSGEPEA

SEQ ID NO: 191 - protein, 491 aa, Artificial Sequence
  PIV200978
MPISILLIITTMIMASHCQIDITKLQHVGVLVNSPKGMKISQNFETRYLILSLIPKIEDSNSCGDQQIKQYKRLLDRLIIPLYDGLRLQKDVIVTNQESNENTDPRTERFFGGVIGTIALGVATSAQITAAVALVEAKQARSDIEKLKEAIRDTNKAVQSVQSSPGNLIVAIKSVQDYVNKEIVPCIARLGCEACGLQLGIALTQHYSELTNIFGDNIGSLQEKGIKLQGIASLYRTNITEIFTTSTVDKYDIYDLLFTESIKVRVIDVDLNDYSITLQVRLPLLTRLLNTQIYKVDSISYNIQNREWYIPLPSHIMTKGAFLGGADVKECIEAFSSYICPSDPGFVLNHEMESCLSGNISQCPRTTVTSDIVPRYAFVNGGVVANCITTTCTCNGIGNRINQPPDQGVKIITHKECNTIGINGMLFNTNKEGTLAFYTPDDITLNNSVALNPIDISIELNKVKSDLEEVKEWIRRVNQKLDSIGSGEPEA

SEQ ID NO: 192 - protein, 491 aa, Artificial Sequence
  PIV200979
MPISILLIITTMIMASHCQIDITKLQHVGVLVNSPKGMKISQNFETRYLILSLIPKIEDSNSCGDQQIKQYKRLLDRLIIPLYDGLRLQKDVIVTNQESNENTDPRTERFFGGVIGTIALGVATSAQITAAVALVEAKQARSDIEKLKEAIRDTNKAVQSVQSSPGNLIVAIKSVQDYVNKEIVPCIARLGCEACGLQLGIALTQHYSELTNIFGDNIGSLQEKGIKLQGIASLYRTNITEIFTTSTVDKYDIYDLLFTESIKVRVIDVDLNDYSITLQVRLPLLTRLLNTQIYKVDSISYNIQNREWYIPLPSHIMTKGAFLGGADVKECIEAFSSYICPSDPGFVLNHEMESCLSGNISQCPRTTVTSDIVPRYAFVNGGVVANCITTTCTCNGIGNRINQPPDQGVKIITHKECNTIGINGMLFNTNKEGTLAFYTPDDITLNNSVALNPIDISIELNKVKSDLEESKEWLRRVNQKLDSIGSGEPEA

SEQ ID NO: 193 - protein, 491 aa, Artificial Sequence
  PIV200980
MPISILLIITTMIMASHCQIDITKLQHVGVLVNSPKGMKISQNFETRYLILSLIPKIEDSNSCGDQQIKQYKRLLDRLIIPLYDGLRLQKDVIVTNQESNENTDPRTERFFGGVIGTIALGVATSAQITAAVALVEAKQARSDIEKLKEAIRDTNKAVQSVQSSPGNLIVAIKSVQDYVNKEIVPCIARLGCEACGLQLGIALTQHYSELTNIFGDNIGSLQEKGIKLQGIASLYRTNITEIFTTSTVDKYDIYDLLFTESIKVRVIDVDLNDYSITLQVRLPLLTRLLNTQIYKVDSISYNIQNREWYIPLPSHIMTKGAFLGGADVKECIEAFSSYICPSDPGFVLNHEMESCLSGNISQCPRTTVTSDIVPRYAFVNGGVVANCITTTCTCNGIGNRINQPPDQGVKIITHKECNTIGINGMLFNTNKEGTLAFYTPDDITLNNSVALNPIDISIELNKAKSDLEEVKEWLRRVNQKLDSIGSGEPEA

SEQ ID NO: 194 - protein, 491 aa, Artificial Sequence
  PIV200982
MPISILLIITTMIMASHCQIDITKLQHVGVLVNSPKGMKISQNFETRYLILSLIPKIEDSNSCGDQQIKQYKRLLDRLIIPLYDGLRLQKDVIVTNQESNENTDPRTERFFGGVIGTIALGVATSAQITAAVALVEAKQARSDIEKLKEAIRDTNKAVQSVQSSPGNLIVAIKSVQDYVNKEIVPCIARLGCEACGLQLGIALTQHYSELTNIFGDNIGSLQEKGIKLQGIASLYRTNITEIFTTSTVDKYDIYDLLFTESIKVRVIDVDLNDYSITLQVRLPLLTRLLNTQIYKVDSISYNIQNREWYIPLPSHIMTKGAFLGGADVKECIEAFSSYICPSDPGFVLNHEMESCLSGNISQCPRTTVTSDIVPRYAFVNGGVVANCITTTCTCNGIGNRINQPPDQGVKIITHKECNTIGINGMLFNTNKEGTLAFYTPDDITLNNSVALNPIDISIELNKVKSDFEEVKEWLRRVNQKLDSIGSGEPEA

SEQ ID NO: 195 - protein, 516 aa, Artificial Sequence
  PIV201082
MPISILLIITTMIMASHCQIDITKLQHVGVLVNSPKGMKISQNFETRYLILSLIPKIEDSNSCGDQQIKQYKRLLDRLIIPLYDGLRLQKDVIVTNQESNENTDPRTERFFGGVIGTIALGVATSAQITAAVALVEAKQARSDIEKLKEAIRDTNKAVQSVQSSVGNLIVAIKSVQDYVNKEIVPSIARLGCEAAGLQLGIALTQHYSELTNIFGDNIGSLQEKGIKLQGIASLYRTNITEIFTTSTVDKYDIYDLLFTESIKVRVIDVDLNDYSITLQVRLPLLTRLLNTQIYKVDSISYNIQNREWYIPLPSHIMTKGAFLGGADVKECIEAFSSYICPSDPGFVLNHEMESCLSGNISQCPRTTVTSDIVPRYAFVNGGVVANCITTTCTCNGIGNRINQPPDQGVKIITHKECNTIGINGMLFNTNKEGTLAFYTPDDITLNNSVALDPIDISIELNKAKSDLEESKEWIRRSNQKLDSIEDKIEEILSKIYHIENEIARIKKLIGEAEPEA

SEQ ID NO: 196 - protein, 491 aa, Artificial Sequence
  PIV201105
MPISILLIITTMIMASHCQIDITKLQHVGVLVNSPKGMKIPQNFETRYLILSLIPKIEDSNSCGDQQIKQYKRLLDRLIIPLYDGLRLMKDVIVTNQESNENTDPRTERFFGGVIGTIALGVATSAQITAAVALVEAKQARSDIEKLKEAIRDTNKAVQSVQSSVGPPIVAIKSVQDYVNKEIVPSIARLGCEAAGLQLGIALTQHYSELTNIFGDNIGSLIEKGIKLQGIASLYRTNITEIFTTSTVDKYDIYDLLFTESIKVRVIDVDLNDYSITLQVRLPLLTRLLNTQIYKVDSISYNIQNREWYIPLPSHIMTKGAFLGGADVKECIEAFSSYICPSDPGFVLNHEMESCLSGNISQCPRTTVTSDIVPRYAFVNGGVVANCITTTCTCNGIGNRINQPPDQGVKIITHKECNTIGINGMLFNTNKEGTLAFYTPDDITLNNSVALNPIDISIELNKAKSDLEEVKEWIRRVNQKLDSIGSGEPEA

SEQ ID NO: 197 - protein, 491 aa, Artificial Sequence
  PIV201106
MPISILLIITTMIMASHCQIDITKLQHVGVLVNSPKGMKISQNFETRYLILSLIPKIEDSNSCGDQQIKQYKRLLDRLIIPLYDGLRLMKDVIVTNQESNENTDPRTERFFGGVIGTIALGVATSAQITAAVALVEAKQARSDIEKLKEAIRDTNKAVQSVQSSVGPPIVAIKSVQDYVNKEIVPSIARLGCEAAGLQLGIALTQHYSELTNIFGDNIGSLIEKGIKLQGIASLYRTNITEIFTTSTVDKYDIYDLLFTESIKVRVIDVDLNDYSITLQVRLPLLTRLLNTQIYKVDSISYNIQNREWYIPLPSHIMTKGAFLGGADVKECIEAFSSYICPSDPGFVLNHEMESCLSGNISQCPRTTVTSDIVPRYAFVNGGVVANCITTTCTCNGIGNRINQPPDQGVKIITHKECNTIGINGMLFNTNKEGTLAFYTPDDITLNNSVALNPIDISIELNKAKSDLEEVKEWIRRVNQKLDSIGSGEPEA

SEQ ID NO: 198 - protein, 491 aa, Artificial Sequence
  PIV201107
MPISILLIITTMIMASHCQIDITKLQHVGVLVNSPKGMKIPQNFETRYLILSLIPKIEDSNSCGDQQIKQYKRLLDRLIIPLYDGLRLQKDVIVTNQESNENTDPRTERFFGGVIGTIALGVATSAQITAAVALVEAKQARSDIEKLKEAIRDTNKAVQSVQSSVGPPIVAIKSVQDYVNKEIVPSIARLGCEAAGLQLGIALTQHYSELTNIFGDNIGSLQEKGIKLQGIASLYRTNITEIFTTSTVDKYDIYDLLFTESIKVRVIDVDLNDYSITLQVRLPLLTRLLNTQIYKVDSISYNIQNREWYIPLPSHIMTKGAFLGGADVKECIEAFSSYICPSDPGFVLNHEMESCLSGNISQCPRTTVTSDIVPRYAFVNGGVVANCITTTCTCNGIGNRINQPPDQGVKIITHKECNTIGINGMLFNTNKEGTLAFYTPDDITLNNSVALNPIDISIELNKAKSDLEEVKEWIRRVNQKLDSIGSGEPEA

SEQ ID NO: 199 - protein, 491 aa, Artificial Sequence
  PIV201108
MPISILLIITTMIMASHCQIDITKLQHVGVLVNSPKGMKIPQNFETRYLILSLIPKIEDSNSCGDQQIKQYKRLLDRLIIPLYDGLRLMKDVIVTNQESNENTDPRTERFFGGVIGTIALGVATSAQITAAVALVEAKQARSDIEKLKEAIRDTNKAVQSVQSSVGNPIVAIKSVQDYVNKEIVPSIARLGCEAAGLQLGIALTQHYSELTNIFGDNIGSLIEKGIKLQGIASLYRTNITEIFTTSTVDKYDIYDLLFTESIKVRVIDVDLNDYSITLQVRLPLLTRLLNTQIYKVDSISYNIQNREWYIPLPSHIMTKGAFLGGADVKECIEAFSSYICPSDPGFVLNHEMESCLSGNISQCPRTTVTSDIVPRYAFVNGGVVANCITTTCTCNGIGNRINQPPDQGVKIITHKECNTIGINGMLFNTNKEGTLAFYTPDDITLNNSVALNPIDISIELNKAKSDLEEVKEWIRRVNQKLDSIGSGEPEA

SEQ ID NO: 200 - protein, 491 aa, Artificial Sequence
  PIV201109
MPISILLIITTMIMASHCQIDITKLQHVGVLVNSPKGMKIPQNFETRYLILSLIPKIEDSNSCGDQQIKQYKRLLDRLIIPLYDGLRLMKDVIVTNQESNENTDPRTERFFGGVIGTIALGVATSAQITAAVALVEAKQARSDIEKLKEAIRDTNKAVQSVQSSVGPLIVAIKSVQDYVNKEIVPSIARLGCEAAGLQLGIALTQHYSELTNIFGDNIGSLIEKGIKLQGIASLYRTNITEIFTTSTVDKYDIYDLLFTESIKVRVIDVDLNDYSITLQVRLPLLTRLLNTQIYKVDSISYNIQNREWYIPLPSHIMTKGAFLGGADVKECIEAFSSYICPSDPGFVLNHEMESCLSGNISQCPRTTVTSDIVPRYAFVNGGVVANCITTTCTCNGIGNRINQPPDQGVKIITHKECNTIGINGMLFNTNKEGTLAFYTPDDITLNNSVALNPIDISIELNKAKSDLEEVKEWIRRVNQKLDSIGSGEPEA

SEQ ID NO: 201 - protein, 491 aa, Artificial Sequence
  PIV201110
MPISILLIITTMIMASHCQIDITKLQHVGVLVNSPKGMKIPQNFETRYLILSLIPKIEDSNSCGDQQIKQYKRLLDRLIIPLYDGLRLMKDVIVTNQESNENTDPRTERFFGGVIGTIALGVATSAQITAAVALVEAKQARSDIEKLKEAIRDTNKAVQSVQSSVGPPIVAIKSVQDYVNKEIVPSIARLGCEAAGLQLGIALTQHYSELTNIFGDNIGSLIEKGIKLQGIASLYRTNITEIFTTSTVDKYDIYDLLFTESIKVRVIDVDLNDYSITLQVRLPLLTRLLNTQIYKVDSISYNIQNREWYIPLPSHIMTKGAFLGGADVKECIEAFSSYICPSDPGFVLNHEMESCLSGNISQCPRTTVTSDIVPRYAFVNGGVVANCITTTCTCNGIGNRINQPPDQGVKIITHKECNTIGINGMLFNTNKEGTLAFYTPDDITLNNSVALDPIDISIELNKAKSDLEEVKEWIRRVNQKLDSIGSGEPEA

SEQ ID NO: 202 - protein, 491 aa, Artificial Sequence
  PIV201111
MPISILLIITTMIMASHCQIDITKLQHVGVLVNSPKGMKIPQNFETRYLILSLIPKIEDSNSCGDQQIKQYKRLLDRLIIPLYDGLRLMKDVIVTNQESNENTDPRTERFFGGVIGTIALGVATSAQITAAVALVEAKQARSDIEKLKEAIRDTNKAVQSVQSSVGPPIVAIKSVQDYVNKEIVPSIARLGCEAAGLQLGIALTQHYSELTNIFGDNIGSLIEKGIKLQGIASLYRTNITEIFTTSTVDKYDIYDLLFTESIKVRVIDVDLNDYSITLQVRLPLLTRLLNTQIYKVDSISYNIQNREWYIPLPSHIMTKGAFLGGADVKECIEAFSSYICPSDPGFVLNHEMESCLSGNISQCPRTTVTSDIVPRYAFVNGGVVANCITTTCTCNGIGNRINQPPDQGVKIITHKECNTIGINGMLFNTNKEGTLAFYTPDDITLNNSVALNPIDISIELNKAKSDLEESKEWIRRVNQKLDSIGSGEPEA

SEQ ID NO: 203 - protein, 491 aa, Artificial Sequence
  PIV201112
MPISILLIITTMIMASHCQIDITKLQHVGVLVNSPKGMKIPQNFETRYLILSLIPKIEDSNSCGDQQIKQYKRLLDRLIIPLYDGLRLMKDVIVTNQESNENTDPRTERFFGGVIGTIALGVATSAQITAAVALVEAKQARSDIEKLKEAIRDTNKAVQSVQSSVGPPIVAIKSVQDYVNKEIVPSIARLGCEAAGLQLGIALTQHYSELTNIFGDNIGSLIEKGIKLQGIASLYRTNITEIFTTSTVDKYDIYDLLFTESIKVRVIDVDLNDYSITLQVRLPLLTRLLNTQIYKVDSISYNIQNREWYIPLPSHIMTKGAFLGGADVKECIEAFSSYICPSDPGFVLNHEMESCLSGNISQCPRTTVTSDIVPRYAFVNGGVVANCITTTCTCNGIGNRINQPPDQGVKIITHKECNTIGINGMLFNTNKEGTLAFYTPDDITLNNSVALNPIDISIELNKAKSDLEEVKEWIRRSNQKLDSIGSGEPEA

SEQ ID NO: 204 - protein, 491 aa, Artificial Sequence
  PIV201113
MPISILLIITTMIMASHCQIDITKLQHVGVLVNSPKGMKIPQNFETRYLILSLIPKIEDSNSCGDQQIKQYKRLLDRLIIPLYDGLRLMKDVIVTNQESNENTDPRTERFFGGVIGTIALGVATSAQITAAVALVEAKQARSDIEKLKEAIRDTNKAVQSVQSSVGPPIVAIKSVQDYVNKEIVPSIARLGCEAAGLQLGIALTQHYSELTNIFGDNIGSLIEKGIKLQGIASLYRTNITEIFTTSTVDKYDIYDLLFTESIKVRVIDVDLNDYSITLQVRLPLLTRLLNTQIYKVDSISYNIQNREWYIPLPSHIMTKGAFLGGADVKECIEAFSSYICPSDPGFVLNHEMESCLSGNISQCPRTTVTSDIVPRYAFVNGGVVANCITTTCTCNGIGNRINQPPDQGVKIITHKECNTIGINGMLFNTNKEGTLAFYTPDDITLNNSVALNPIDISIELNKAKSDLEESKEWIRRSNQKLDSIGSGEPEA

SEQ ID NO: 205 - protein, 491 aa, Artificial Sequence
  PIV201114
MPISILLIITTMIMASHCQIDITKLQHVGVLVNSPKGMKIPQNFETRYLILSLIPKIEDSNSCGDQQIKQYKRLLDRLIIPLYDGLRLMKDVIVTNQESNENTDPRTERFFGGVIGTIALGVATSAQITAAVALVEAKQARSDIEKLKEAIRDTNKAVQSVQSSVGPPIVAIKSVQDYVNKEIVPSIARLGCEAAGLQLGIALTQHYSELTNIFGDNIGSLIEKGIKLQGIASLYRTNITEIFTTSTVDKYDIYDLLFTESIKVRVIDVDLNDYSITLQVRLPLLTRLLNTQIYKVDSISYNIQNREWYIPLPSHIMTKGAFLGGADVKECIEAPSSYICPSDPGFVLNHEMESCLSGNISQCPRTTVTSDIVPRYAFVNGGVVANCITTTCTCNGIGNRINQPPDQGVKIITHKECNTIGINGMLFNTNKEGTLAFYTPDDITLNNSVALNPIDISIELNKAKSDLEEVKEWIRRVNQKLDSIGSGEPEA

SEQ ID NO: 206 - protein, 516 aa, Artificial Sequence
  PIV201115
MPISILLIITTMIMASHCQIDITKLQHVGVLVNSPKGMKISQNFETRYLILSLIPKIEDSNSCGDQQIKQYKRLLDRLIIPLYDGLRLMKDVIVTNQESNENTDPRTERFFGGVIGTIALGVATSAQITAAVALVEAKQARSDIEKLKEAIRDTNKAVQSVQSSVGNLIVAIKSVQDYVNKEIVPSIARLGCEAAGLQLGIALTQHYSELTNIFGDNIGSLQEKGIKLQGIASLYRTNITEIFTTSTVDKYDIYDLLFTESIKVRVIDVDLNDYSITLQVRLPLLTRLLNTQIYKVDSISYNIQNREWYIPLPSHIMTKGAFLGGADVKECIEAFSSYICPSDPGFVLNHEMESCLSGNISQCPRTTVTSDIVPRYAFVNGGVVANCITTTCTCNGIGNRINQPPDQGVKIITHKECNTIGINGMLFNTNKEGTLAFYTPDDITLNNSVALNPIDISIELNKAKSDLEESKEWIRRSNQKLDSIEDKIEEILSKIYHIENEIARIKKLIGEAEPEA

SEQ ID NO: 207 - protein, 516 aa, Artificial Sequence
  PIV201116
MPISILLIITTMIMASHCQIDITKLQHVGVLVNSPKGMKISQNFETRYLILSLIPKIEDSNSCGDQQIKQYKRLLDRLIIPLYDGLRLQKDVIVTNQESNENTDPRTERFFGGVIGTIALGVATSAQITAAVALVEAKQARSDIEKLKEAIRDTNKAVQSVQSSVGNLIVAIKSVQDYVNKEIVPSIARLGCEAAGLQLGIALTQHYSELTNIFGDNIGSLIEKGIKLQGIASLYRTNITEIFTTSTVDKYDIYDLLFTESIKVRVIDVDLNDYSITLQVRLPLLTRLLNTQIYKVDSISYNIQNREWYIPLPSHIMTKGAFLGGADVKECIEAFSSYICPSDPGFVLNHEMESCLSGNISQCPRTTVTSDIVPRYAFVNGGVVANCITTTCTCNGIGNRINQPPDQGVKIITHKECNTIGINGMLFNTNKEGTLAFYTPDDITLNNSVALNPIDISIELNKAKSDLEESKEWIRRSNQKLDSIEDKIEEILSKIYHIENEIARIKKLIGEAEPEA

SEQ ID NO: 208 - protein, 491 aa, Artificial Sequence
  PIV201254
MPISILLIITTMIMASHCQIDITKLQHVGVLVNSPKGMKIPQNFETRYLILSLIPKIEDSNSCGDQQIKQYKRLLDRLIIPLYDGLRLMKDVIVTNQESNENTDPRTERFFGGVIGTIALGVATSAQITAAVALVEAKQARSDIEKLKEAIRDTNKAVQSVQSSVGNPIVAIKSVQDYVNKEIVPSIARLGCEAAGLQLGIALTQHYSELTNIFGDNIGSLIEKGIKLQGIASLYRTNITEIFTTSTVDKYDIYDLLFTESIKVRVIDVDLNDYSITLQVRLPLLTRLLNTQIYKVDSISYNIQNREWYIPLPSHIMTKGAFLGGADVKECIEAFSSYICPSDPGFVLNHEMESCLSGNISQCPRTTVTSDIVPRYAFVNGGVVANCITTTCTCNGIGNRINQPPDQGVKIITHKECNTIGINGMLFNTNKEGTLAFYTPDDITLNNSVALDPIDISIELNKAKSDLEEVKEWIRRVNQKLDSIGSGEPEA

SEQ ID NO: 209 - protein, 491 aa, Artificial Sequence
  PIV201255
MPISILLIITTMIMASHCQIDITKLQHVGVLVNSPKGMKIPQNFETRYLILSLIPKIEDSNSCGDQQIKQYKRLLDRLIIPLYDGLRLMKDVIVTNQESNENTDPRTERFFGGVIGTIALGVATSAQITAAVALVEAKQARSDIEKLKEAIRDTNKAVQSVQSSVGNPIVAIKSVQDYVNKEIVPSIARLGCEAAGLQLGIALTQHYSELTNIFGDNIGSLIEKGIKLQGIASLYRTNITEIFTTSTVDKYDIYDLLFTESIKVRVIDVDLNDYSITLQVRLPLLTRLLNTQIYKVDSISYNIQNREWYIPLPSHIMTKGAFLGGADVKECIEAPSSYICPSDPGFVLNHEMESCLSGNISQCPRTTVTSDIVPRYAFVNGGVVANCITTTCTCNGIGNRINQPPDQGVKIITHKECNTIGINGMLFNTNKEGTLAFYTPDDITLNNSVALDPIDISIELNKAKSDLEEVKEWIRRVNQKLDSIGSGEPEA

SEQ ID NO: 210 - protein, 491 aa, Artificial Sequence
  PIV201256
MPISILLIITTMIMASHCQIDITKLQHVGVLVNSPKGMKIPQNFETRYLILSLIPKIEDSNSCGDQQIKQYKRLLDRLIIPLYDGLRLMKDVIVTNQESNENTDPRTERFFGGVIGTIALGVATSAQITAAVALVEAKQARSDIEKLKEAIRDTNKAVQSVQSSVGPPIVAIKSVQDYVNKEIVPSIARLGCEAAGLQLGIALTQHYSELTNIFGDNIGSLIEKGIKLQGIASLYRTNITEIFTTSTVDKYDIYDLLFTESIKVRVIDVDLNDYSITLQVRLPLLTRLLNTQIYKVDSISYNIQNREWYIPLPSHIMTKGAFLGGADVKECIEAPSSYICPSDPGFVLNHEMESCLSGNISQCPRTTVTSDIVPRYAFVNGGVVANCITTTCTCNGIGNRINQPPDQGVKIITHKECNTIGINGMLFNTNKEGTLAFYTPDDITLNNSVALDPIDISIELNKAKSDLEEVKEWIRRVNQKLDSIGSGEPEA

SEQ ID NO: 211 - protein, 491 aa, Artificial Sequence
  PIV201257
MPISILLIITTMIMASHCQIDITKLQHVGVLVNSPKGMKIPQNFETRYLILSLIPKIEDSNSCGDQQIKQYKRLLDRLIIPLYDGLRLMKDVIVTNQESNENTDPRTERFFGGVIGTIALGVATSAQITAAVALVEAKQARSDIEKLKEAIRDTNKAVQSVQSSVGNPIVAIKSVQDYVNKEIVPSIARLGCEAAGLQLGIALTQHYSELTNIFGDNIGSLIEKGIKLQGIASLYRTNITEIFTTSTVDKYDIYDLLFTESIKVRVIDVDLNDYSITLQVRLPLLTRLLNTQIYKVDSISYNIQNREWYIPLPSHIMTKGAFLGGADVKECIEAPSSYICPSDPGFVLNHEMESCLSGNISQCPRTTVTSDIVPRYAFVNGGVVANCITTTCTCNGIGNRINQPPDQGVKIITHKECNTIGINGMLFNTNKEGTLAFYTPDDITLNNSVALNPIDISIELNKAKSDLEEVKEWIRRVNQKLDSIGSGEPEA

SEQ ID NO: 212 - protein, 491 aa, Artificial Sequence
  PIV210233
MPISILLIITTMIMASHCQIDITKLQHVGVLVNSPKGMKISQNFETRYLILSLIPKIEDSNSCGDQQIKQYKRLLDRLIIPLYDGLRLMKDVIVTNQESNENTDPRTERFFGGVIGTIALGVATSAQITAAVALVEAKQARSDIEKLKEAIRDTNKAVQSVQSSVGNPIVAIKSVQDYVNKEIVPSIARLGCEAAGLQLGIALTQHYSELTNIFGDNIGSLIEKGIKLQGIASLYRTNITEIFTTSTVDKYDIYDLLFTESIKVRVIDVDLNDYSITLQVRLPLLTRLLNTQIYKVDSISYNIQNREWYIPLPSHIMTKGAFLGGADVKECIEAFSSYICPSDPGFVLNHEMESCLSGNISQCPRTTVTSDIVPRYAFVNGGVVANCITTTCTCNGIGNRINQPPDQGVKIITHKECNTIGINGMLFNTNKEGTLAFYTPDDITLNNSVALDPIDISIELNKAKSDLEEVKEWIRRVNQKLDSIGSGEPEA

SEQ ID NO: 213 - protein, 491 aa, Artificial Sequence
  PIV210234
MPISILLIITTMIMASHCQIDITKLQHVGVLVNSPKGMKIPQNFETRYLILSLIPKIEDSNSCGDQQIKQYKRLLDRLIIPLYDGLRLQKDVIVTNQESNENTDPRTERFFGGVIGTIALGVATSAQITAAVALVEAKQARSDIEKLKEAIRDTNKAVQSVQSSVGNPIVAIKSVQDYVNKEIVPSIARLGCEAAGLQLGIALTQHYSELTNIFGDNIGSLQEKGIKLQGIASLYRTNITEIFTTSTVDKYDIYDLLFTESIKVRVIDVDLNDYSITLQVRLPLLTRLLNTQIYKVDSISYNIQNREWYIPLPSHIMTKGAFLGGADVKECIEAFSSYICPSDPGFVLNHEMESCLSGNISQCPRTTVTSDIVPRYAFVNGGVVANCITTTCTCNGIGNRINQPPDQGVKIITHKECNTIGINGMLFNTNKEGTLAFYTPDDITLNNSVALDPIDISIELNKAKSDLEEVKEWIRRVNQKLDSIGSGEPEA

SEQ ID NO: 214 - protein, 491 aa, Artificial Sequence
  PIV210235
MPISILLIITTMIMASHCQIDITKLQHVGVLVNSPKGMKIPQNFETRYLILSLIPKIEDSNSCGDQQIKQYKRLLDRLIIPLYDGLRLMKDVIVTNQESNENTDPRTERFFGGVIGTIALGVATSAQITAAVALVEAKQARSDIEKLKEAIRDTNKAVQSVQSSVGNLIVAIKSVQDYVNKEIVPSIARLGCEAAGLQLGIALTQHYSELTNIFGDNIGSLIEKGIKLQGIASLYRTNITEIFTTSTVDKYDIYDLLFTESIKVRVIDVDLNDYSITLQVRLPLLTRLLNTQIYKVDSISYNIQNREWYIPLPSHIMTKGAFLGGADVKECIEAFSSYICPSDPGFVLNHEMESCLSGNISQCPRTTVTSDIVPRYAFVNGGVVANCITTTCTCNGIGNRINQPPDQGVKIITHKECNTIGINGMLFNTNKEGTLAFYTPDDITLNNSVALDPIDISIELNKAKSDLEEVKEWIRRVNQKLDSIGSGEPEA

SEQ ID NO: 215 - protein, 491 aa, Artificial Sequence
  PIV210236
MPISILLIITTMIMASHCQIDITKLQHVGVLVNSPKGMKIPQNFETRYLILSLIPKIEDSNSCGDQQIKQYKRLLDRLIIPLYDGLRLMKDVIVTNQESNENTDPRTERFFGGVIGTIALGVATSAQITAAVALVEAKQARSDIEKLKEAIRDTNKAVQSVQSSVGNPIVAIKSVQDYVNKEIVPSIARLGCEAAGLQLGIALTQHYSELTNIFGDNIGSLIEKGIKLQGIASLYRTNITEIFTTSTVDKYDIYDLLFTESIKVRVIDVDLNDYSITLQVRLPLLTRLLNTQIYKVDSISYNIQNREWYIPLPSHIMTKGAFLGGADVKECIEAFSSYICPSDPGFVLNHEMESCLSGNISQCPRTTVTSDIVPRYAFVNGGVVANCITTTCTCNGIGNRINQPPDQGVKIITHKECNTIGINGMLFNTNKEGTLAFYTPDDITLNNSVALDPIDISIELNKAKSDLEESKEWIRRVNQKLDSIGSGEPEA

SEQ ID NO: 216 - protein, 491 aa, Artificial Sequence
  PIV210237
MPISILLIITTMIMASHCQIDITKLQHVGVLVNSPKGMKIPQNFETRYLILSLIPKIEDSNSCGDQQIKQYKRLLDRLIIPLYDGLRLMKDVIVTNQESNENTDPRTERFFGGVIGTIALGVATSAQITAAVALVEAKQARSDIEKLKEAIRDTNKAVQSVQSSVGNPIVAIKSVQDYVNKEIVPSIARLGCEAAGLQLGIALTQHYSELTNIFGDNIGSLIEKGIKLQGIASLYRTNITEIFTTSTVDKYDIYDLLFTESIKVRVIDVDLNDYSITLQVRLPLLTRLLNTQIYKVDSISYNIQNREWYIPLPSHIMTKGAFLGGADVKECIEAFSSYICPSDPGFVLNHEMESCLSGNISQCPRTTVTSDIVPRYAFVNGGVVANCITTTCTCNGIGNRINQPPDQGVKIITHKECNTIGINGMLFNTNKEGTLAFYTPDDITLNNSVALDPIDISIELNKAKSDLEEVKEWIRRSNQKLDSIGSGEPEA

SEQ ID NO: 217 - protein, 491 aa, Artificial Sequence
  PIV210238
MPISILLIITTMIMASHCQIDITKLQHVGVLVNSPKGMKIPQNFETRYLILSLIPKIEDSNSCGDQQIKQYKRLLDRLIIPLYDGLRLMKDVIVTNQESNENTDPRTERFFGGVIGTIALGVATSAQITAAVALVEAKQARSDIEKLKEAIRDTNKAVQSVQSSVGNPIVAIKSVQDYVNKEIVPSIARLGCEAAGLQLGIALTQHYSELTNIFGDNIGSLIEKGIKLQGIASLYRTNITEIFTTSTVDKYDIYDLLFTESIKVRVIDVDLNDYSITLQVRLPLLTRLLNTQIYKVDSISYNIQNREWYIPLPSHIMTKGAFLGGADVKECIEAFSSYICPSDPGFVLNHEMESCLSGNISQCPRTTVTSDIVPRYAFVNGGVVANCITTTCTCNGIGNRINQPPDQGVKIITHKECNTIGINGMLFNTNKEGTLAFYTPDDITLNNSVALDPIDISIELNKAKSDLEESKEWIRRSNQKLDSIGSGEPEA

SEQ ID NO: 218 - protein, 491 aa, Artificial Sequence
  PIV210294
MPISILLIITTMIMASHCQIDITKLQHVGVLVNSPKGMKISQNFETRYLILSLIPKIEDSNSCGDQQIKQYKRLLDRLIIPLYDGLRLQKDVIVTNQESNENTDPRTERFFGGVIGTIALGVATSAQITAAVALVEAKQARSDIEKLKEAIRDTNKAVQSVQSSVGNLIVAIKSVQDYVNKEIVPSIARLGCEAAGLQLGIALTQHYSELTNIFGDNIGSLQEKGIKLQGIASLYRTNITEIFTTSTVDKYDIYDLLFTESIKVRVIDVDLNDYSITLQVRLPLLTRLLNTQIYKVDSISYNIQNREWYIPLPSHIMTKGAFLGGADVKECIEAFSSYICPSDPGFVLNHEMESCLSGNISQCPRTTVTSDIVPRYAFVNGGVVANCITTTCTCNGIGNRINQPPDQGVKIITHKECNTIGINGMLFNTNKEGTLAFYTPDDITLNNSVALDPIDISIELNKAKSDLEEVKEWIRRVNQKLDSIGGSEPEA

SEQ ID NO: 219 - protein, 491 aa, Artificial Sequence
  PIV210295
MPISILLIITTMIMASHCQIDITKLQHVGVLVNSPKGMKIPQNFETRYLILSLIPKIEDSNSCGDQQIKQYKRLLDRLIIPLYDGLRLQKDVIVTNQESNENTDPRTERFFGGVIGTIALGVATSAQITAAVALVEAKQARSDIEKLKEAIRDTNKAVQSVQSSVGNLIVAIKSVQDYVNKEIVPSIARLGCEAAGLQLGIALTQHYSELTNIFGDNIGSLQEKGIKLQGIASLYRTNITEIFTTSTVDKYDIYDLLFTESIKVRVIDVDLNDYSITLQVRLPLLTRLLNTQIYKVDSISYNIQNREWYIPLPSHIMTKGAFLGGADVKECIEAFSSYICPSDPGFVLNHEMESCLSGNISQCPRTTVTSDIVPRYAFVNGGVVANCITTTCTCNGIGNRINQPPDQGVKIITHKECNTIGINGMLFNTNKEGTLAFYTPDDITLNNSVALDPIDISIELNKAKSDLEESKEWIRRSNQKLDSIGGSEPEA

SEQ ID NO: 220 - protein, 491 aa, Artificial Sequence
  PIV210296
MPISILLIITTMIMASHCQIDITKLQHVGVLVNSPKGMKIPQNFETRYLILSLIPKIEDSNSCGDQQIKQYKRLLDRLIIPLYDGLRLQKDVIVTNQESNENTDPRTERFFGGVIGTIALGVATSAQITAAVALVEAKQARSDIEKLKEAIRDTNKAVQSVQSSVGNLIVAIKSVQDYVNKEIVPSIARLGCEAAGLQLGIALTQHYSELTNIFGDNIGSLQEKGIKLQGIASLYRTNITEIFTTSTVDKYDIYDLLFTESIKVRVIDVDLNDYSITLQVRLPLLTRLLNTQIYKVDSISYNIQNREWYIPLPSHIMTKGAFLGGADVKECIEAFSSYICPSDPGFVLNHEMESCLSGNISQCPRTTVTSDIVPRYAFVNGGVVANCITTTCTCNGIGNRINQPPDQGVKIITHKECNTIGINGMLFNTNKEGTLAFYTPDDITLNNSVALDPIDISIELNKAKSDLEEVKEWIRRVNQKLDSIGGSEPEA

SEQ ID NO: 221 - protein, 491 aa, Artificial Sequence
  PIV210297
MPISILLIITTMIMASHCQIDITKLQHVGVLVNSPKGMKISQNFETRYLILSLIPKIEDSNSCGDQQIKQYKRLLDRLIIPLYDGLRLQKDVIVTNQESNENTDPRTERFFGGVIGTIALGVATSAQITAAVALVEAKQARSDIEKLKEAIRDTNKAVQSVQSSVGNPIVAIKSVQDYVNKEIVPSIARLGCEAAGLQLGIALTQHYSELTNIFGDNIGSLQEKGIKLQGIASLYRTNITEIFTTSTVDKYDIYDLLFTESIKVRVIDVDLNDYSITLQVRLPLLTRLLNTQIYKVDSISYNIQNREWYIPLPSHIMTKGAFLGGADVKECIEAFSSYICPSDPGFVLNHEMESCLSGNISQCPRTTVTSDIVPRYAFVNGGVVANCITTTCTCNGIGNRINQPPDQGVKIITHKECNTIGINGMLFNTNKEGTLAFYTPDDITLNNSVALDPIDISIELNKAKSDLEESKEWIRRSNQKLDSIGGSEPEA

SEQ ID NO: 222 - protein, 491 aa, Artificial Sequence
  PIV210298
MPISILLIITTMIMASHCQIDITKLQHVGVLVNSPKGMKISQNFETRYLILSLIPKIEDSNSCGDQQIKQYKRLLDRLIIPLYDGLRLQKDVIVTNQESNENTDPRTERFFGGVIGTIALGVATSAQITAAVALVEAKQARSDIEKLKEAIRDTNKAVQSVQSSVGNPIVAIKSVQDYVNKEIVPSIARLGCEAAGLQLGIALTQHYSELTNIFGDNIGSLQEKGIKLQGIASLYRTNITEIFTTSTVDKYDIYDLLFTESIKVRVIDVDLNDYSITLQVRLPLLTRLLNTQIYKVDSISYNIQNREWYIPLPSHIMTKGAFLGGADVKECIEAFSSYICPSDPGFVLNHEMESCLSGNISQCPRTTVTSDIVPRYAFVNGGVVANCITTTCTCNGIGNRINQPPDQGVKIITHKECNTIGINGMLFNTNKEGTLAFYTPDDITLNNSVALDPIDISIELNKAKSDLEEVKEWIRRVNQKLDSIGGSEPEA

SEQ ID NO: 223 - protein, 491 aa, Artificial Sequence
  PIV210299
MPISILLIITTMIMASHCQIDITKLQHVGVLVNSPKGMKISQNFETRYLILSLIPKIEDSNSCGDQQIKQYKRLLDRLIIPLYDGLRLQKDVIVTNQESNENTDPRTERFFGGVIGTIALGVATSAQITAAVALVEAKQARSDIEKLKEAIRDTNKAVQSVQSSVGPLIVAIKSVQDYVNKEIVPSIARLGCEAAGLQLGIALTQHYSELTNIFGDNIGSLQEKGIKLQGIASLYRTNITEIFTTSTVDKYDIYDLLFTESIKVRVIDVDLNDYSITLQVRLPLLTRLLNTQIYKVDSISYNIQNREWYIPLPSHIMTKGAFLGGADVKECIEAFSSYICPSDPGFVLNHEMESCLSGNISQCPRTTVTSDIVPRYAFVNGGVVANCITTTCTCNGIGNRINQPPDQGVKIITHKECNTIGINGMLFNTNKEGTLAFYTPDDITLNNSVALDPIDISIELNKAKSDLEESKEWIRRSNQKLDSIGGSEPEA

SEQ ID NO: 224 - protein, 491 aa, Artificial Sequence
  PIV210300
MPISILLIITTMIMASHCQIDITKLQHVGVLVNSPKGMKISQNFETRYLILSLIPKIEDSNSCGDQQIKQYKRLLDRLIIPLYDGLRLQKDVIVTNQESNENTDPRTERFFGGVIGTIALGVATSAQITAAVALVEAKQARSDIEKLKEAIRDTNKAVQSVQSSVGPLIVAIKSVQDYVNKEIVPSIARLGCEAAGLQLGIALTQHYSELTNIFGDNIGSLQEKGIKLQGIASLYRTNITEIFTTSTVDKYDIYDLLFTESIKVRVIDVDLNDYSITLQVRLPLLTRLLNTQIYKVDSISYNIQNREWYIPLPSHIMTKGAFLGGADVKECIEAFSSYICPSDPGFVLNHEMESCLSGNISQCPRTTVTSDIVPRYAFVNGGVVANCITTTCTCNGIGNRINQPPDQGVKIITHKECNTIGINGMLFNTNKEGTLAFYTPDDITLNNSVALDPIDISIELNKAKSDLEEVKEWIRRVNQKLDSIGGSEPEA

SEQ ID NO: 225 - protein, 491 aa, Artificial Sequence
  PIV210301
MPISILLIITTMIMASHCQIDITKLQHVGVLVNSPKGMKISQNFETRYLILSLIPKIEDSNSCGDQQIKQYKRLLDRLIIPLYDGLRLQKDVIVTNQESNENTDPRTERFFGGVIGTIALGVATSAQITAAVALVEAKQARSDIEKLKEAIRDTNKAVQSVQSSVGNLIVAIKSVQDYVNKEIVPSIARLGCEAAGLQLGIALTQHYSELTNIFGDNIGSLQEKGIKLQGIASLYRTNITEIFTTSTVDKYDIYDLLFTESIKVRVIDVDLNDYSITLQVRLPLLTRLLNTQIYKVDSISYNIQNREWYIPLPSHIMTKGAFLGGADVKECIEAPSSYICPSDPGFVLNHEMESCLSGNISQCPRTTVTSDIVPRYAFVNGGVVANCITTTCTCNGIGNRINQPPDQGVKIITHKECNTIGINGMLFNTNKEGTLAFYTPDDITLNNSVALDPIDISIELNKAKSDLEESKEWIRRSNQKLDSIGGSEPEA

SEQ ID NO: 226 - protein, 491 aa, Artificial Sequence
  PIV210302
MPISILLIITTMIMASHCQIDITKLQHVGVLVNSPKGMKISQNFETRYLILSLIPKIEDSNSCGDQQIKQYKRLLDRLIIPLYDGLRLQKDVIVTNQESNENTDPRTERFFGGVIGTIALGVATSAQITAAVALVEAKQARSDIEKLKEAIRDTNKAVQSVQSSVGNLIVAIKSVQDYVNKEIVPSIARLGCEAAGLQLGIALTQHYSELTNIFGDNIGSLQEKGIKLQGIASLYRTNITEIFTTSTVDKYDIYDLLFTESIKVRVIDVDLNDYSITLQVRLPLLTRLLNTQIYKVDSISYNIQNREWYIPLPSHIMTKGAFLGGADVKECIEAPSSYICPSDPGFVLNHEMESCLSGNISQCPRTTVTSDIVPRYAFVNGGVVANCITTTCTCNGIGNRINQPPDQGVKIITHKECNTIGINGMLFNTNKEGTLAFYTPDDITLNNSVALDPIDISIELNKAKSDLEEVKEWIRRVNQKLDSIGGSEPEA

SEQ ID NO: 227 - protein, 491 aa, Artificial Sequence
  PIV210303
MPISILLIITTMIMASHCQIDITKLQHVGVLVNSPKGMKISQNFETRYLILSLIPKIEDSNSCGDQQIKQYKRLLDRLIIPLYDGLRLMKDVIVTNQESNENTDPRTERFFGGVIGTIALGVATSAQITAAVALVEAKQARSDIEKLKEAIRDTNKAVQSVQSSVGNLIVAIKSVQDYVNKEIVPSIARLGCEAAGLQLGIALTQHYSELTNIFGDNIGSLIEKGIKLQGIASLYRTNITEIFTTSTVDKYDIYDLLFTESIKVRVIDVDLNDYSITLQVRLPLLTRLLNTQIYKVDSISYNIQNREWYIPLPSHIMTKGAFLGGADVKECIEAFSSYICPSDPGFVLNHEMESCLSGNISQCPRTTVTSDIVPRYAFVNGGVVANCITTTCTCNGIGNRINQPPDQGVKIITHKECNTIGINGMLFNTNKEGTLAFYTPDDITLNNSVALDPIDISIELNKAKSDLEESKEWIRRSNQKLDSIGGSEPEA

SEQ ID NO: 228 - protein, 491 aa, Artificial Sequence
  PIV210304
MPISILLIITTMIMASHCQIDITKLQHVGVLVNSPKGMKISQNFETRYLILSLIPKIEDSNSCGDQQIKQYKRLLDRLIIPLYDGLRLMKDVIVTNQESNENTDPRTERFFGGVIGTIALGVATSAQITAAVALVEAKQARSDIEKLKEAIRDTNKAVQSVQSSVGNLIVAIKSVQDYVNKEIVPSIARLGCEAAGLQLGIALTQHYSELTNIFGDNIGSLIEKGIKLQGIASLYRTNITEIFTTSTVDKYDIYDLLFTESIKVRVIDVDLNDYSITLQVRLPLLTRLLNTQIYKVDSISYNIQNREWYIPLPSHIMTKGAFLGGADVKECIEAFSSYICPSDPGFVLNHEMESCLSGNISQCPRTTVTSDIVPRYAFVNGGVVANCITTTCTCNGIGNRINQPPDQGVKIITHKECNTIGINGMLFNTNKEGTLAFYTPDDITLNNSVALDPIDISIELNKAKSDLEEVKEWIRRVNQKLDSIGGSEPEA

SEQ ID NO: 229 - protein, 491 aa, Artificial Sequence
  PIV210305
MPISILLIITTMIMASHCQIDITKLQHVGVLVNSPKGMKIPQNFETRYLILSLIPKIEDSNSCGDQQIKQYKRLLDRLIIPLYDGLRLQKDVIVTNQESNENTDPRTERFFGGVIGTIALGVATSAQITAAVALVEAKQARSDIEKLKEAIRDTNKAVQSVQSSVGNPIVAIKSVQDYVNKEIVPSIARLGCEAAGLQLGIALTQHYSELTNIFGDNIGSLQEKGIKLQGIASLYRTNITEIFTTSTVDKYDIYDLLFTESIKVRVIDVDLNDYSITLQVRLPLLTRLLNTQIYKVDSISYNIQNREWYIPLPSHIMTKGAFLGGADVKECIEAFSSYICPSDPGFVLNHEMESCLSGNISQCPRTTVTSDIVPRYAFVNGGVVANCITTTCTCNGIGNRINQPPDQGVKIITHKECNTIGINGMLFNTNKEGTLAFYTPDDITLNNSVALDPIDISIELNKAKSDLEESKEWIRRSNQKLDSIGGSEPEA

SEQ ID NO: 230 - protein, 491 aa, Artificial Sequence
  PIV210306
MPISILLIITTMIMASHCQIDITKLQHVGVLVNSPKGMKIPQNFETRYLILSLIPKIEDSNSCGDQQIKQYKRLLDRLIIPLYDGLRLQKDVIVTNQESNENTDPRTERFFGGVIGTIALGVATSAQITAAVALVEAKQARSDIEKLKEAIRDTNKAVQSVQSSVGNPIVAIKSVQDYVNKEIVPSIARLGCEAAGLQLGIALTQHYSELTNIFGDNIGSLQEKGIKLQGIASLYRTNITEIFTTSTVDKYDIYDLLFTESIKVRVIDVDLNDYSITLQVRLPLLTRLLNTQIYKVDSISYNIQNREWYIPLPSHIMTKGAFLGGADVKECIEAFSSYICPSDPGFVLNHEMESCLSGNISQCPRTTVTSDIVPRYAFVNGGVVANCITTTCTCNGIGNRINQPPDQGVKIITHKECNTIGINGMLFNTNKEGTLAFYTPDDITLNNSVALDPIDISIELNKAKSDLEEVKEWIRRVNQKLDSIGGSEPEA

SEQ ID NO: 231 - protein, 491 aa, Artificial Sequence
  PIV210307
MPISILLIITTMIMASHCQIDITKLQHVGVLVNSPKGMKISQNFETRYLILSLIPKIEDSNSCGDQQIKQYKRLLDRLIIPLYDGLRLMKDVIVTNQESNENTDPRTERFFGGVIGTIALGVATSAQITAAVALVEAKQARSDIEKLKEAIRDTNKAVQSVQSSVGNPIVAIKSVQDYVNKEIVPSIARLGCEAAGLQLGIALTQHYSELTNIFGDNIGSLIEKGIKLQGIASLYRTNITEIFTTSTVDKYDIYDLLFTESIKVRVIDVDLNDYSITLQVRLPLLTRLLNTQIYKVDSISYNIQNREWYIPLPSHIMTKGAFLGGADVKECIEAFSSYICPSDPGFVLNHEMESCLSGNISQCPRTTVTSDIVPRYAFVNGGVVANCITTTCTCNGIGNRINQPPDQGVKIITHKECNTIGINGMLFNTNKEGTLAFYTPDDITLNNSVALDPIDISIELNKAKSDLEESKEWIRRSNQKLDSIGGSEPEA

SEQ ID NO: 232 - protein, 491 aa, Artificial Sequence
  PIV210308
MPISILLIITTMIMASHCQIDITKLQHVGVLVNSPKGMKISQNFETRYLILSLIPKIEDSNSCGDQQIKQYKRLLDRLIIPLYDGLRLMKDVIVTNQESNENTDPRTERFFGGVIGTIALGVATSAQITAAVALVEAKQARSDIEKLKEAIRDTNKAVQSVQSSVGNPIVAIKSVQDYVNKEIVPSIARLGCEAAGLQLGIALTQHYSELTNIFGDNIGSLIEKGIKLQGIASLYRTNITEIFTTSTVDKYDIYDLLFTESIKVRVIDVDLNDYSITLQVRLPLLTRLLNTQIYKVDSISYNIQNREWYIPLPSHIMTKGAFLGGADVKECIEAFSSYICPSDPGFVLNHEMESCLSGNISQCPRTTVTSDIVPRYAFVNGGVVANCITTTCTCNGIGNRINQPPDQGVKIITHKECNTIGINGMLFNTNKEGTLAFYTPDDITLNNSVALDPIDISIELNKAKSDLEEVKEWIRRVNQKLDSIGGSEPEA

SEQ ID NO: 233 - protein, 491 aa, Artificial Sequence
  PIV210309
MPISILLIITTMIMASHCQIDITKLQHVGVLVNSPKGMKISQNFETRYLILSLIPKIEDSNSCGDQQIKQYKRLLDRLIIPLYDGLRLQKDVIVTNQESNENTDPRTERFFGGVIGTIALGVATSAQITAAVALVEAKQARSDIEKLKEAIRDTNKAVQSVQSSPGNLIVAIKSVQDYVNKEIVPSIARLGCEAAGLQLGIALTQHYSELTNIFGDNIGSLQEKGIKLQGIASLYRTNITEIFTTSTVDKYDIYDLLFTESIKVRVIDVDLNDYSITLQVRLPLLTRLLNTQIYKVDSISYNIQNREWYIPLPSHIMTKGAFLGGADVKECIEAFSSYICPSDPGFVLNHEMESCLSGNISQCPRTTVTSDIVPRYAFVNGGVVANCITTTCTCNGIGNRINQPPDQGVKIITHKECNTIGINGMLFNTNKEGTLAFYTPDDITLNNSVALDPIDISIELNKAKSDLEESKEWIRRSNQKLDSIGGSEPEA

SEQ ID NO: 234 - protein, 491 aa, Artificial Sequence
  PIV210310
MPISILLIITTMIMASHCQIDITKLQHVGVLVNSPKGMKISQNFETRYLILSLIPKIEDSNSCGDQQIKQYKRLLDRLIIPLYDGLRLQKDVIVTNQESNENTDPRTERFFGGVIGTIALGVATSAQITAAVALVEAKQARSDIEKLKEAIRDTNKAVQSVQSSPGNLIVAIKSVQDYVNKEIVPSIARLGCEAAGLQLGIALTQHYSELTNIFGDNIGSLQEKGIKLQGIASLYRTNITEIFTTSTVDKYDIYDLLFTESIKVRVIDVDLNDYSITLQVRLPLLTRLLNTQIYKVDSISYNIQNREWYIPLPSHIMTKGAFLGGADVKECIEAFSSYICPSDPGFVLNHEMESCLSGNISQCPRTTVTSDIVPRYAFVNGGVVANCITTTCTCNGIGNRINQPPDQGVKIITHKECNTIGINGMLFNTNKEGTLAFYTPDDITLNNSVALDPIDISIELNKAKSDLEEVKEWIRRVNQKLDSIGGSEPEA

SEQ ID NO: 235 - protein, 491 aa, Artificial Sequence
  PIV210311
MPISILLIITTMIMASHCQIDITKLQHVGVLVNSPKGMKISQNFETRYLILSLIPKIEDSNSCGDQQIKQYKRLLDRLIIPLYDGLRLQKDVIVTNQESNENTDPRTERFFGGVIGTIALGVATSAQITAAVALVEAKQARSDIEKLKEAIRDTNKAVQSVQSSVGNLIVAIKSVQDYVNKEIVPSIARLGCEAAGLLLGIALTQHYSELTNIFGDNIGSLQEKGIKLQGIASLYRTNITEIFTTSTVDKYDIYDLLFTESIKVRVIDVDLNDYSITLQVRLPLLTRLLNTQIYKVDSISYNIQNREWYIPLPSHIMTKGAFLGGADVKECIEAFSSYICPSDPGFVLNHEMESCLSGNISQCPRTTVTSDIVPRYAFVNGGVVANCITTTCTCNGIGNRINQPPDQGVKIITHKECNTIGINGMLFNTNKEGTLAFYTPDDITLNNSVALDPIDISIELNKAKSDLEESKEWIRRSNQKLDSIGGSEPEA

SEQ ID NO: 236 - protein, 491 aa, Artificial Sequence
  PIV210312
MPISILLIITTMIMASHCQIDITKLQHVGVLVNSPKGMKISQNFETRYLILSLIPKIEDSNSCGDQQIKQYKRLLDRLIIPLYDGLRLQKDVIVTNQESNENTDPRTERFFGGVIGTIALGVATSAQITAAVALVEAKQARSDIEKLKEAIRDTNKAVQSVQSSVGNLIVAIKSVQDYVNKEIVPSIARLGCEAAGLLLGIALTQHYSELTNIFGDNIGSLQEKGIKLQGIASLYRTNITEIFTTSTVDKYDIYDLLFTESIKVRVIDVDLNDYSITLQVRLPLLTRLLNTQIYKVDSISYNIQNREWYIPLPSHIMTKGAFLGGADVKECIEAFSSYICPSDPGFVLNHEMESCLSGNISQCPRTTVTSDIVPRYAFVNGGVVANCITTTCTCNGIGNRINQPPDQGVKIITHKECNTIGINGMLFNTNKEGTLAFYTPDDITLNNSVALDPIDISIELNKAKSDLEEVKEWIRRVNQKLDSIGGSEPEA

SEQ ID NO: 237 - protein, 485 aa, Artificial Sequence
  PIV211368
MPISILLIITTMIMASHCQIDITKLQHVGVLVNSPKGMKIPQNFETRYLILSLIPKIEDSNSCGDQQIKQYKRLLDRLIIPLYDGLRLMKDVIVTNQESNENTDPRTERFFGGVIGTIALGVATSAQITAAVALVEAKQARSDIEKLKEAIRDTNKAVQSVQSSVGNPIVAIKSVQDYVNKEIVPSIARLGCEAAGLQLGIALTQHYSELTNIFGDNIGSLIEKGIKLQGIASLYRTNITEIFTTSTVDKYDIYDLLFTESIKVRVIDVDLNDYSITLQVRLPLLTRLLNTQIYKVDSISYNIQNREWYIPLPSHIMTKGAFLGGADVKECIEAFSSYICPSDPGFVLNHEMESCLSGNISQCPRTTVTSDIVPRYAFVNGGVVANCITTTCTCNGIGNRINQPPDQGVKIITHKECNTIGINGMLFNTNKEGTLAFYTPDDITLNNSVALDPIDISIELNKAKSDLEEVKEWIRRVNQKLDSIG

SEQ ID NO: 238 - protein, 485 aa, Artificial Sequence
  PIV211886
MPISILLIITTMIMASHCQIDITKLQHVGVLVNSPKGMKISQNFETRYLILSLIPKIEDSNSCGDQQIKQYKRLLDRLIIPLYDGLRLMKDVIVTNQESNENTDPRTERFFGGVIGTIALGVATSAQITAAVALVEAKQARSDIEKLKEAIRDTNKAVQSVQSSVGNPIVAIKSVQDYVNKEIVPSIARLGCEAAGLQLGIALTQHYSELTNIFGDNIGSLIEKGIKLQGIASLYRTNITEIFTTSTVDKYDIYDLLFTESIKVRVIDVDLNDYSITLQVRLPLLTRLLNTQIYKVDSISYNIQNREWYIPLPSHIMTKGAFLGGADVKECIEAFSSYICPSDPGFVLNHEMESCLSGNISQCPRTTVTSDIVPRYAFVNGGVVANCITTTCTCNGIGNRINQPPDQGVKIITHKECNTIGINGMLFNTNKEGTLAFYTPDDITLNNSVALDPIDISIELNKAKSDLEEVKEWIRRVNQKLDSIG

SEQ ID NO: 239 - protein, 485 aa, Artificial Sequence
  PIV211887
MPISILLIITTMIMASHCQIDITKLQHVGVLVNSPKGMKIPQNFETRYLILSLIPKIEDSNSCGDQQIKQYKRLLDRLIIPLYDGLRLQKDVIVTNQESNENTDPRTERFFGGVIGTIALGVATSAQITAAVALVEAKQARSDIEKLKEAIRDTNKAVQSVQSSVGNPIVAIKSVQDYVNKEIVPSIARLGCEAAGLQLGIALTQHYSELTNIFGDNIGSLQEKGIKLQGIASLYRTNITEIFTTSTVDKYDIYDLLFTESIKVRVIDVDLNDYSITLQVRLPLLTRLLNTQIYKVDSISYNIQNREWYIPLPSHIMTKGAFLGGADVKECIEAFSSYICPSDPGFVLNHEMESCLSGNISQCPRTTVTSDIVPRYAFVNGGVVANCITTTCTCNGIGNRINQPPDQGVKIITHKECNTIGINGMLFNTNKEGTLAFYTPDDITLNNSVALDPIDISIELNKAKSDLEEVKEWIRRVNQKLDSIG

SEQ ID NO: 240 - protein, 485 aa, Artificial Sequence
  PIV211888
MPISILLIITTMIMASHCQIDITKLQHVGVLVNSPKGMKIPQNFETRYLILSLIPKIEDSNSCGDQQIKQYKRLLDRLIIPLYDGLRLMKDVIVTNQESNENTDPRTERFFGGVIGTIALGVATSAQITAAVALVEAKQARSDIEKLKEAIRDTNKAVQSVQSSVGNPIVAIKSVQDYVNKEIVPSIARLGCEAAGLQLGIALTQHYSELTNIFGDNIGSLIEKGIKLQGIASLYRTNITEIFTTSTVDKYDIYDLLFTESIKVRVIDVDLNDYSITLQVRLPLLTRLLNTQIYKVDSISYNIQNREWYIPLPSHIMTKGAFLGGADVKECIEAFSSYICPSDPGFVLNHEMESCLSGNISQCPRTTVTSDIVPRYAFVNGGVVANCITTTCTCNGIGNRINQPPDQGVKIITHKECNTIGINGMLFNTNKEGTLAFYTPDDITLNNSVALDPIDISIELNKAKSDLEESKEWIRRVNQKLDSIG

SEQ ID NO: 241 - protein, 485 aa, Artificial Sequence
  PIV211889
MPISILLIITTMIMASHCQIDITKLQHVGVLVNSPKGMKIPQNFETRYLILSLIPKIEDSNSCGDQQIKQYKRLLDRLIIPLYDGLRLMKDVIVTNQESNENTDPRTERFFGGVIGTIALGVATSAQITAAVALVEAKQARSDIEKLKEAIRDTNKAVQSVQSSVGNPIVAIKSVQDYVNKEIVPSIARLGCEAAGLQLGIALTQHYSELTNIFGDNIGSLIEKGIKLQGIASLYRTNITEIFTTSTVDKYDIYDLLFTESIKVRVIDVDLNDYSITLQVRLPLLTRLLNTQIYKVDSISYNIQNREWYIPLPSHIMTKGAFLGGADVKECIEAFSSYICPSDPGFVLNHEMESCLSGNISQCPRTTVTSDIVPRYAFVNGGVVANCITTTCTCNGIGNRINQPPDQGVKIITHKECNTIGINGMLFNTNKEGTLAFYTPDDITLNNSVALDPIDISIELNKAKSDLEEVKEWIRRSNQKLDSIG

SEQ ID NO: 242 - protein, 485 aa, Artificial Sequence
  PIV211890
MPISILLIITTMIMASHCQIDITKLQHVGVLVNSPKGMKIPQNFETRYLILSLIPKIEDSNSCGDQQIKQYKRLLDRLIIPLYDGLRLMKDVIVTNQESNENTDPRTERFFGGVIGTIALGVATSAQITAAVALVEAKQARSDIEKLKEAIRDTNKAVQSVQSSVGNLIVAIKSVQDYVNKEIVPSIARLGCEAAGLQLGIALTQHYSELTNIFGDNIGSLIEKGIKLQGIASLYRTNITEIFTTSTVDKYDIYDLLFTESIKVRVIDVDLNDYSITLQVRLPLLTRLLNTQIYKVDSISYNIQNREWYIPLPSHIMTKGAFLGGADVKECIEAFSSYICPSDPGFVLNHEMESCLSGNISQCPRTTVTSDIVPRYAFVNGGVVANCITTTCTCNGIGNRINQPPDQGVKIITHKECNTIGINGMLFNTNKEGTLAFYTPDDITLNNSVALDPIDISIELNKAKSDLEEVKEWIRRVNQKLDSIG
